(19) United States
(12) Patent Application Publication
(10) Pub. No.: US 2019/0093122 A1
(43) Pub. Date: Mar. 28, 2019

(54) ENGINEERING CRASSULACEAN ACID METABOLISM (CAM) PATHWAYS IN PLANTS

(71) Applicant: BOARD OF REGENTS OF NEVADA SYSTEM OF HIGHER EDUCATION, ON BEHALF OF UNIVERSITY, Reno, NV (US)

(72) Inventors: John C. Cushman, Reno, NV (US); Sung Don Lim, Reno, NV (US); Won Cheol Yim, Reno, NV (US)

(73) Assignee: BOARD OF REGENTS OF NEVADA SYSTEM OF HIGHER EDUCATION, ON BEHALF OF UNIVERSITY, Reno, NV (US)

(21) Appl. No.: 16/027,145

(22) Filed: Jul. 3, 2018

Related U.S. Application Data
(63) Continuation-in-part of application No. PCT/US2017/012639, filed on Jan. 6, 2017.
(60) Provisional application No. 62/276,438, filed on Jan. 8, 2016.

(51) Int. Cl. C12N 15/82

(52) U.S. Cl. CPC C12N 15/8269

(57) ABSTRACT

Disclosed herein are method of altering CAM pathways in plants. In some examples, a disclosed method includes overexpressing one or more genes encoding one or more enzymes that carry out the basic biochemical sequence of nocturnal CO₂ fixation (carboxylation) into C₄ acids (malate), store C₄ acids in the vacuole of the plant, and/or then decarboxylate and refix the released CO₂ by C₃ photosynthesis during the subsequent day in a plant cell, thereby altering CAM in the plant cell. Also disclosed herein are isolated polynucleotide sequences, transformation vectors, transgenic plant cells, plant part, and plants. The disclosed methods and compositions can be used to improve the water-use efficiency and drought tolerance and durability of plants, such as in plants in arid environments, and also enhance the ability of plants to perform.

### CROSS REFERENCE TO RELATED APPLICATIONS

[0001] This application is a Continuation-in-Part of International Application No. PCT/2017/012639, filed Jan. 6, 2017, which was published in English under PCT Article 21(2), which in turn claims the benefit of U.S. Provisional Patent Application No. 62/276,438, filed on Jan. 8, 2016, each disclosure of which is herein incorporated by reference in its entirety.

### ACKNOWLEDGMENT OF GOVERNMENT SUPPORT

[0002] This invention was made with government support under DE-SC0008834 awarded by the United States Department of Energy. The government has certain rights in the invention.

### FIELD

[0003] This disclosure relates to the field of plant molecular biology and genetic engineering and specifically to methods of modulating crassulacean acid metabolism (CAM) pathways in plants.

### BACKGROUND

[0004] There is a pressing need to increase global food production world-wide and to improve plant water-use efficiency and drought tolerance. Global climate change is predicted to increase heat, drought, and soil-drying conditions, and thereby increase crop sensitivity to water vapor pressure deficit, resulting in productivity losses. Increasing competition between agricultural freshwater use and municipal or industrial uses suggest that crops with greater heat and drought durability and greater water-use efficiency will be crucial for sustainable biomass production systems in the future. Thus, there is an on-going need to identify genetic mechanisms and factors involved in improving water-use efficiency, drought tolerance, and overall plant health.

### SUMMARY

[0005] Disclosed herein are methods of altering crassulacean acid metabolism (CAM) pathways in plants. Also disclosed herein are isolated polynucleotide sequences comprising a plant promoter, a polynucleotide sequence of a gene encoding one or more enzymes involved in regulating CAM pathways, polynucleotide sequence of a plant terminator, and a polynucleotide sequence of an insulator to improve expression in a plant. Plant transformation vectors comprising a disclosed isolated polynucleotide sequence are also provided to facilitate the construction of multi-gene circuits for expression within plant cells. Moreover, transgenic plant cells, plant part, and plants comprising a disclosed vector construct are provided.

[0006] In some embodiments a disclosed method comprises overexpressing one or more genes encoding one or more enzymes that carry out the basic biochemical sequence of nocturnal CO₂ fixation (carboxylation) into C₄ acids (malate), store C₄ acids in the vacuole of the plant, and/or then decarboxylate and refix the released CO₂ by C₃ photosynthesis during the subsequent day in a plant cell, thereby altering CAM in the plant cell. In one embodiment, the one or more genes comprise McBca2 (Beta carbonic anhydrase 2), McPpck (phosphoenolpyruvate carboxylase kinase), McPpc1 (phosphoenolpyruvate carboxylase), McNAD-Mdh2 [NAD(P) malate dehydrogenase 2], McALMT4 (putative aluminum-activated malate transporter), MctDT (tonoplast dicarboxylate transporter), McNADP-ME3 (NADP-dependent malic enzyme 3), McPpdk1 (pyruvate orthophosphate dikinase), and/or McPpdk-RP (pyruvate orthophosphate dikinase-regulatory protein). In some examples, the sequence includes full-length wild-type (or native) coding sequence, as well as allelic variants, fragments, homologs or fusion sequences that retain the ability to be expressed at increased levels in a plant cell and regulate the temporal or circadian expression of CAM, and trigger increased CAM expression under water-deficit stress conditions. In certain examples, the sequence has at least 80% sequence identity, for example at least 85%, 90%, 95%, or 98% sequence identity to wild-type sequence for McBca2 (Beta carbonic anhydrase 2), McPpck (phosphoenolpyruvate carboxylase kinase), McPpc1 (phosphoenolpyruvate carboxylase), McNAD-Mdh2 [NAD(P) malate dehydrogenase 2], McALMT4 (putative aluminum-activated malate transporter), MctDT (tonoplast dicarboxylate transporter), McNADP-ME3 (NADP-dependent malic enzyme 3), McPpdk1 (pyruvate orthophosphate dikinase), and/or McPpdk-RP (pyruvate orthophosphate dikinase-regulatory protein).

[0007] The disclosed methods can be used to improve the water-use efficiency and drought tolerance or durability of plants, such as in plants in arid environments, and also enhance the ability of plants to perform. In some examples, a disclosed method is used to increase plant cell size, leaf size, leaf number, reduce hypocotyl length, increase hypocotyl length, increase inflorescence width, increase inflorescence height, increase plant root size, increase plant root length, increase plant tissue succulence, increase plant water content, increase plant flower size, increase plant floral organ size, increase plant silique, increase fruit size, increase plant seed size, increase plant seed area, increase plant mass, increase plant seed number, increase plant total seed production; increase plant inflorescence number, or any combination thereof. In some examples, the method is used to generate a plant with improved water-use efficiency or drought tolerance. In some examples, the method is used to delay plant flowering time, such as up to two weeks. In other examples, the method is used to stimulate plant flowering. In some examples, the method is used to reduce intracellular air space with the resulting plant becoming an anatomically optimized host for performance of (engineered) CAM. In some examples, the method is used to increase plant tolerance to salinity and related salts that impose an ionic stress. In some examples, the methods are used to increase plant tolerance to osmotic stress, such as to mannitol or PEG, and related osmotic agents that impose an osmotic stress.

[0008] In some embodiments, a disclosed method for engineered CAM is combined with engineered tissue succulence (such as that disclosed in U.S. Patent Provisional Application No. 62/255,158, filed on Nov. 13, 2015 and PCT/US2016/06177, filed on Nov. 13, 2016, each of which is hereby incorporated by reference in its entirety) in order to improve the overall operational efficiency of the CAM pathway by limited the diffusion of CO₂ from leaf tissues during the daytime decarboxylation phases of the CAM cycle.

[0009] The foregoing and other features and advantages of the invention will become more apparent from the following detailed description, which proceeds with reference to the accompanying figures.

### BRIEF DESCRIPTION OF THE DRAWINGS

[0010] FIG. 1 is diagram of the Crassulacean acid metabolism (CAM) photosynthetic pathway.

[0011] FIG. 2A provides a series of graphs illustrating mRNA expression patterns of selected core CAM genes in Mesembryanthemum crystallinum.

[0012] FIG. 2B provides a series of images illustrating subcellular localizations of selected core ice plant CAM gene products in Arabidopsis.

[0013] FIG. 3A is a schematic representation of the binary vector construct used for histochemical β-glucuronidase (GUS) staining of selected promoter:GUS reporters selected using in silico promoter prediction approaches.

[0014] FIGS. 3B and 3C are a series of digital images illustrating tissue-specific expression patterns of 14 selected promoters in Arabidopsis.

[0015] FIG. 4 provides digital images of representative GUS-stained tissues of 14 selected Arabidopsis promoters driving GUS expression at various stages of Arabidopsis growth and development.

[0016] FIG. 5 provides a series of graphs illustrating rhythmic, circadian expression patterns of nine candidate promoters for expressing of ice plant core CAM genes in Arabidopsis.

[0017] FIGS. 6A-6D provide schematic illustrations of vector constructs used for the expression of multiple CAM genes in planta.

[0018] FIG. 7 provides a schematic representation of McBca2 (Beta carbonic anhydrase 2) gene cassette in position binary vector 1.

[0019] FIG. 8 is a schematic representation of McPpck (phosphoenolpyruvate carboxylase kinase) gene cassette in position binary vector 2.

[0020] FIG. 9 is a schematic representation of McPpc1 (phosphoenolpyruvate carboxylase) gene cassette in position binary vector 3.

[0021] FIG. 10 is a schematic representation of McMDH2 [NAD(P) malate dehydrogenase 2] gene cassette in position binary vector 4.

[0022] FIG. 11 is a schematic representation of McALMT4 (putative aluminum-activated malate transporter) gene cassette in position binary vector 5.

[0023] FIG. 12 is a schematic representation of MctDT (tonoplast dicarboxylate transporter) gene cassette in position binary vector 6.

[0024] FIG. 13 is a schematic representation of McNADP-ME3 (NADP-dependent malic enzyme 3) gene cassette in position binary vector 7.

[0025] FIG. 14 is a schematic representation of McPpdk1 (pyruvate orthophosphate dikinase) gene cassette in position binary vector 8.

[0026] FIG. 15 is a schematic representation of McPpdk-RP (pyruvate orthophosphate dikinase-regulatory protein) gene cassette in position binary vector 9.

[0027] FIGS. 16A and 16B illustrate the cloning efficiency of CAM gene cassette via Gibson isothermal assembly.

[0028] FIG. 17 is a schematic representation of a CAM gene circuit for introducing CAM photosynthetic machinery into the C₃ photosynthesis plant Arabidopsis.

[0029] FIG. 18 illustrates subcellular localizations of selected core ice plant CAM genes of the carboxylation module expressed in Arabidopsis.

[0030] FIG. 19 illustrates subcellular localizations of selected core ice plant CAM genes of the decarboxylation module in Arabidopsis.

[0031] FIG. 20 illustrates overexpression of each core ice plant CAM gene alters overall plant size in Arabidopsis.

[0032] FIG. 21 illustrates overexpression of core ice plant CAM gene increases rosette size in Arabidopsis.

[0033] FIG. 22 illustrates overexpression of core ice plant CAM gene increases leaf size in Arabidopsis.

[0034] FIG. 23 illustrates overexpression of core ice plant CAM gene increases leaf FW in Arabidopsis.

[0035] FIG. 24 illustrates Overexpression of core ice plant CAM gene alters leaf stomatal conductance in Arabidopsis.

[0036] FIG. 25 illustrates overexpression of core ice plant CAM gene alters malate content in Arabidopsis.

[0037] FIG. 26 provides a schematic representation of the carboxylation module gene cassette.

[0038] FIGS. 27A-27E illustrates engineered carboxylation module synergistically increase overall plant biomass.

[0039] FIG. 28 illustrates engineered carboxylation module increase malate content in Arabidopsis.

[0040] FIGS. 29A and 29B illustrate engineered carboxylation module increase seed size in Arabidopsis.

[0041] FIGS. 30A-30D illustrate engineered carboxylation module increases net CO₂ assimilation, stomatal conductance, and ROS scavenging capacity under highlight conditions in Arabidopsis.

[0042] FIGS. 31A and 31B illustrate engineered carboxylation module increases nocturnal net CO₂ assimilation and stomatal conductance in Arabidopsis.

### SEQUENCE LISTING

[0043] The nucleic and amino acid sequences listed in the accompanying sequence listing are shown using standard letter abbreviations for nucleotide bases, and three letter code for amino acids, as defined in 37 C.F.R. 1.822. Only one strand of each nucleic acid sequence is shown, but the complementary strand is understood as included by any reference to the displayed strand. The Sequence Listing is submitted as an ASCII text file in the form of the file named “Sequence.txt”, which is incorporated by reference herein.

### DETAILED DESCRIPTION

### I. Introduction

[0044] CAM is a specialized form of photosynthesis that reduces relative crop water demand about five-to-six-fold compared with C₃ photosynthesis species. This water saving adaptation shifts atmospheric CO₂ uptake from the day, when transpirational water losses are high, to the night when such losses are greatly reduced, which in turn results in greater water-use efficiency and improved drought tolerance.

[0045] FIG. 1 provides a simplified diagram of the CAM photosynthetic pathway. CAM plants open their stomata during the night, allowing atmospheric CO₂ to enter and is converted to bicarbonate (HCO₃—) by carbonic anhydrase (CA). Next, the primary carboxylation step combines the HCO₃— with phosphoenolpyruvate (PEP) as catalyzed by phosphoenolpyruvate carboxylase (PEPC) leading to the formation of oxaloacetate (OAA), which is converted into malate (MAL) a C₄ acid by malate dehydrogenase, which is then transported into the vacuole by malate transporters (tDT and ALMT) where it undergoes protonation and storage as malic acid. During the subsequent day, when stomata are closed, malic acid exits the vacuole and is decarboxylated to release CO₂ in the chloroplast and is refixed via a secondary carboxylation step by ribulose-1,5-bisphosphate carboxylase/oxygenase (RUBISCO) through the Calvin cycle. C₃ acids serve as the substrate for gluconeogenesis where carbohydrates are regenerated and stored as starch (or other storage polysaccharides depending on the plant species). During the subsequent night, starch is degraded to form PEP, thus completing the temporal cycle. Key metabolites and transporters (core CAM genes): glucose-6-phosphate (G6P), phosphoenolpyruvate (PEP), carbonic anhydrase (CA), PEP carboxylase (PPC), PPC kinase (PPCK), NAD(P) malate dehydrogenase (NAD(P)-MDH), NADP-dependent malic enzyme (NADP-ME), pyruvate orthophosphate dikinase (PPDK), PPDK regulatory protein (PPDK-RP), PEP carboxykinase (PEPCK), tonoplast dicarboxylate transporter (tDT), aluminum-activated malate transporter (ALMT), vacuolar ATPase (V-ATPase), and vacuolar pyrophosphatase (V-PPiase).

[0046] Disclosed herein are methods for the genetic engineering of CAM. In an exemplary embodiment, the method includes overexpression of a set of genes are encoding a suite of enzymes that carry out the basic biochemical sequence of nocturnal CO₂ fixation (carboxylation) into C₄ acids (malate), store these C₄ acids in the vacuole of the plant, and then decarboxylate and refix the released CO₂ by C₃ photosynthesis during the subsequent day. For example, the method allows these enzymes to be expressed at the appropriate time of day using a matched set of time-specific 5′ regulatory regions identified in the target host plant (e.g., Arabidopsis thaliana). Another advantage of disclosed methods is the expression of these genes encoding this suite of CAM enzymes will only occur in a significant way when the plants are exposed to water-deficit stress. The disclosed methods avoid the energetic burden of performing CAM, estimated to be about 10% of a plant's energy budget, unless this water-saving adaptation is needed and thus preserve high plant growth rates under well-watered conditions.

[0047] In particular, a suite of 9 (or more) genes encoding enzymes that carry out a sequence of enzymatic reactions required for the nocturnal carboxylation of CO₂ to malic acid and the subsequent daytime decarboxylation of malate to release CO₂ within the chloroplast for C₃ photosynthesis were characterized from the facultative CAM species Mesembryanthemum crystallinum. Each gene product was then tested to determine its exact subcellular localization to validate the expected location within the cell. Each gene was then expressed under the control of a circadianly controlled 5′ regulatory region (i.e., promoter) from Arabidopsis thaliana that conferred the correct temporal expression pattern necessary to carry out the proper biochemical sequence of enzymatic reactions and transport steps. Each promoter conferred increased expression of their respective transgene under conditions of water-deficit stress so that the CAM pathway was operational largely under water-deficit conditions. This conditional or facultative induction of the engineered CAM pathway retained robust plant growth and overall productivity under well-watered conditions. Gypsy barrier insulators, which prevent transcriptional interference from adjacent transcriptional cassettes and gene silencing, were included into each expression cassette to prevent or decrease transgene silencing. Each enzyme or transporter was also tagged with a unique epitope tag to monitor transgene expression within the plant. Each expression cassette was then combined into a series of complex gene circuits using the Gibson assembly approach. Thus, the disclosed methods permit plants to shift their atmospheric CO₂ uptake from the day, when transpirational water losses are high, to the night when such losses are greatly reduced, which in turn results in greater water-use efficiency, while also conferring improved drought tolerance. The disclosed methods and compositions benefit the agribusiness sector by reducing water inputs needed for crops, while at the same time improving drought tolerance. Moreover, they confer value to the agribusiness sector through increased water-use efficiency and reductions in crop water demand, while also conferring improved drought tolerance.

### II. Terms

[0048] The following explanations of terms and methods are provided to better describe the present disclosure and to guide those of ordinary skill in the art in the practice of the present disclosure. As used herein, “comprising” means “including” and the singular forms “a” or “an” or “the” include plural references unless the context clearly dictates otherwise. For example, reference to “comprising a plant” includes one or a plurality of such plants and reference to “the seed” includes reference to one or more seeds and equivalents thereof known to those skilled in the art, and so forth. The term “or” refers to a single element of stated alternative elements or a combination of two or more elements, unless the context clearly indicates otherwise. For example, the phrase “A or B” refers to A, B, or a combination of both A and B.

[0049] Furthermore, the various elements, features and steps discussed herein, as well as other known equivalents for each such element, feature or step, can be mixed and matched by one of ordinary skill in this art to perform methods in accordance with principles described herein. Among the various elements, features, and steps some will be specifically included and others specifically excluded in particular examples.

[0050] Unless explained otherwise, all technical and scientific terms used herein have the same meaning as commonly understood to one of ordinary skill in the art to which this disclosure belongs. Although methods and materials similar or equivalent to those described herein can be used in the practice or testing of the present disclosure, suitable methods and materials are described below. The materials, methods, and examples are illustrative only and not intended to be limiting. All references cited herein are incorporated by reference. Definitions of common terms in molecular biology may be found in Benjamin Lewin Genes V published by Oxford University Press, 1994 (ISBN 0-19-854287-9); Kendrew et al. (eds.) The Encyclopedia of Molecular Biology, published by Blackwell Science Ltd., 1994 (ISBN 0-632-02182-9); and Robert A. Meyers (ed.) Molecular Biology and Biotechnology: a Comprehensive Desk Reference, published by VCH Publishers, Inc., 1995 (ISBN 1-56081-569-8).

[0051] Suitable methods and materials for the practice of the disclosed embodiments are described below. In addition, any appropriate method or technique well known to the ordinarily skilled artisan can be used in the performance of the disclosed embodiments. Some conventional methods and techniques applicable to the present disclosure are described, for example, in Sambrook et al., Molecular Cloning: A Laboratory Manual, 2d ed., Cold Spring Harbor Laboratory Press, 1989; Sambrook et al., Molecular Cloning: A Laboratory Manual, 3d ed., Cold Spring Harbor Press, 2001; Ausubel et al., Current Protocols in Molecular Biology, Greene Publishing Associates, 1992 (and Supplements to 2000); Ausubel et al., Short Protocols in Molecular Biology: A Compendium of Methods from Current Protocols in Molecular Biology, 4th ed., Wiley & Sons, 1999; Harlow and Lane, Antibodies: A Laboratory Manual, Cold Spring Harbor Laboratory Press, 1990; Harlow and Lane, Using Antibodies: A Laboratory Manual, Cold Spring Harbor Laboratory Press, 1999; and Kieser, T., Bibb, M. J., Buttner, M. J., Chater, K. F., and Hopwood, D. A.: Practical Streptomyces genetics, John Innes Centre, Norwich Research Park, Colney, Norwich NR4 &UH, England, 2000.

[0052] All publications, patent applications, patents, and other references mentioned herein are incorporated by reference in their entirety. In case of conflict, the present specification, including explanations of terms, will control. In addition, the materials, methods, and examples are illustrative only and not intended to be limiting.

[0053] In order to facilitate review of the various embodiments of this disclosure, the following explanations of specific terms are provided:

[0054] 5′ and/or 3′: Nucleic acid molecules (such as, DNA and RNA) are said to have “5′ ends” and “3′ ends” because mononucleotides are reacted to make polynucleotides in a manner such that the 5′ phosphate of one mononucleotide pentose ring is attached to the 3′ oxygen of its neighbor in one direction via a phosphodiester linkage. Therefore, one end of a polynucleotide is referred to as the “5′ end” when its 5′ phosphate is not linked to the 3′ oxygen of a mononucleotide pentose ring. The other end of a polynucleotide is referred to as the “3′ end” when its 3′ oxygen is not linked to a 5′ phosphate of another mononucleotide pentose ring. Notwithstanding that a 5′ phosphate of one mononucleotide pentose ring is attached to the 3′ oxygen of its neighbor, an internal nucleic acid sequence also may be said to have 5′ and 3′ ends.

[0055] In either a linear or circular nucleic acid molecule, discrete internal elements are referred to as being “upstream” or 5′ of the “downstream” or 3′ elements. With regard to DNA, this terminology reflects that transcription proceeds in a 5′ to 3′ direction along a DNA strand. Promoter and enhancer elements, which direct transcription of a linked gene, are generally located 5′ or upstream of the coding region. However, enhancer elements can exert their effect even when located 3′ of the promoter element and the coding region. Transcription termination and polyadenylation signals are located 3′ or downstream of the coding region.

[0056] Agronomic trait: Characteristic of a plant, which characteristics include, but are not limited to, plant morphology, physiology, growth and development, yield, nutritional enhancement, disease or pest resistance, or environmental or chemical tolerance are agronomic traits. An “enhanced agronomic trait” refers to a measurable improvement in an agronomic trait including, but not limited to, yield increase, including increased yield under non-stress conditions and increased yield under environmental stress conditions. Stress conditions may include, for example, drought, shade, fungal disease, viral disease, bacterial disease, insect infestation, nematode infestation, cold temperature exposure, heat exposure, osmotic stress, reduced nitrogen nutrient availability, reduced phosphorus nutrient availability and high plant density. “Yield” can be affected by many properties including without limitation, plant height, pod number, pod position on the plant, number of internodes, incidence of pod shatter, grain size, efficiency of nodulation and nitrogen fixation, efficiency of nutrient assimilation, resistance to biotic and abiotic stress, carbon assimilation, plant architecture, resistance to lodging, percent seed germination, seedling vigor, and juvenile traits. Yield can also be affected by efficiency of germination (including germination in stressed conditions), growth rate (including growth rate in stressed conditions), siliquie or ear number, seed number per silique or ear, seed size, composition of seed (starch, oil, protein) and characteristics of seed fill. Increased yield may result from improved utilization of key biochemical compounds, such as nitrogen, phosphorous and carbohydrate, or from improved responses to environmental stresses, such as cold, heat, drought, salt, and attack by pests or pathogens. Recombinant DNA used in this disclosure can also be used to provide plants having improved growth and development, and ultimately increased yield, as the result of modified expression of plant growth regulators or modification of cell cycle or photosynthesis pathways. Additional examples of agronomic traits, and altering such traits in plants, are provided herein and/or will be recognized by those of ordinary skill in the art.

[0057] Alterations: Alterations in a polynucleotide (for example, a polypeptide encoded by a nucleic acid of the present invention), as this term is used herein, comprise any deletions, insertions, and point mutations in the polynucleotide sequence. Included within this definition are alterations to the genomic DNA sequence that encodes the polypeptide. Likewise, the term “alteration” may be used to refer to deletions, insertions, and other mutations in polypeptide sequences.

[0058] Altering level of production or expression: Changing, either by increasing or decreasing, the level of production or expression of a nucleic acid molecule or an amino acid molecule (for example an mRNA, a gene, a polypeptide, or a peptide), as compared to a control level of production or expression.

[0059] Amplification: When used in reference to a nucleic acid, this refers to techniques that increase the number of copies of a nucleic acid molecule in a sample or specimen. An example of amplification is the polymerase chain reaction, in which a biological sample collected from a subject is contacted with a pair of oligonucleotide primers, under conditions that allow for the hybridization of the primers to nucleic acid template in the sample. The primers are extended under suitable conditions, dissociated from the template, and then re-annealed, extended, and dissociated to amplify the number of copies of the nucleic acid. The product of in vitro amplification can be characterized by electrophoresis, restriction endonuclease cleavage patterns, oligonucleotide hybridization or ligation, and/or nucleic acid sequencing, using standard techniques. Other examples of in vitro amplification techniques include strand displacement amplification (see U.S. Pat. No. 5,744,311); transcription-free isothermal amplification (see U.S. Pat. No. 6,033,881); repair chain reaction amplification (see WO 90/01069); ligase chain reaction amplification (see EP-A-320 308); gap filling ligase chain reaction amplification (see U.S. Pat. No. 5,427,930); coupled ligase detection and PCR (see U.S. Pat. No. 6,027,889); and NASBA™ RNA transcription-free amplification (see U.S. Pat. No. 6,025,134).

[0060] Antisense, Sense, and Antigene: DNA has two antiparallel strands, a 5′ →3′ strand, referred to as the plus strand, and a 3′ →5′ strand, referred to as the minus strand. Because RNA polymerase adds nucleic acids in a 5′ →3′ direction, the minus strand of the DNA serves as the template for the RNA during transcription. Thus, an RNA transcript will have a sequence complementary to the minus strand, and identical to the plus strand (except that U is substituted for T).

[0061] Antisense molecules are molecules that are specifically hybridizable or specifically complementary to either RNA or the plus strand of DNA. Sense molecules are molecules that are specifically hybridizable or specifically complementary to the minus strand of DNA. Antigene molecules are either antisense or sense molecules directed to a DNA target. An antisense RNA (asRNA) is a molecule of RNA complementary to a sense (encoding) nucleic acid molecule.

[0062] cDNA (complementary DNA): A piece of DNA lacking internal, non-coding segments (introns) and transcriptional regulatory sequences. cDNA may also contain untranslated regions (UTRs) that are responsible for translational control in the corresponding RNA molecule. cDNA is usually synthesized in the laboratory by reverse transcription from messenger RNA extracted from cells or other samples.

[0063] Cell: Cell as used herein includes a plant cell, whether isolated, in tissue culture or incorporated in a plant or plant part.

[0064] Chimeric or Chimera: The product of the fusion of portions of two or more different polynucleotide or polypeptide molecules. For instance, the phrases “chimeric sequence” and “chimeric gene” refer to nucleotide sequences derived from at least two heterologous parts. Chimeric sequence may comprise DNA or RNA.

[0065] Chimeric transcription regulatory region: An array of nucleic acid control or regulatory sequences that direct transcription of a nucleic acid operably linked thereto, which array is assembled from different polynucleotide sources. For instance, chimeric transcription regulatory regions as described herein may be produced through manipulation of known promoters or other polynucleotide molecules. Chimeric transcription regulatory regions may combine one or more enhancer domains with one or more promoters, for example, by fusing a heterologous enhancer domain from a first native promoter to a second promoter with its own partial or complete set of regulatory element(s).

[0066] Construct: Any recombinant polynucleotide molecule such as a plasmid, cosmid, virus, autonomously replicating polynucleotide molecule, phage, or linear or circular single-stranded or double-stranded DNA or RNA polynucleotide molecule, derived from any source, capable of genomic integration or autonomous replication, comprising a polynucleotide molecule where one or more transcribable polynucleotide molecule has been operably linked.

[0067] Control plant: A plant that does not contain a recombinant DNA that confers (for instance) an enhanced or altered agronomic trait in a transgenic plant, is used as a baseline for comparison, for instance, in order to identify an enhanced or altered agronomic trait in the transgenic plant. A suitable control plant may be a non-transgenic plant of the parental line used to generate a transgenic plant, or a plant that at least is non-transgenic for the particular trait under examination (that is, the control plant may have been engineered to contain other heterologous sequences or recombinant DNA molecules). Thus, a control plant may in some cases be a transgenic plant line that comprises an empty vector or marker gene, but does not contain the recombinant DNA, or does not contain all of the recombinant DNAs, as in the test plant.

[0068] Crassulacean Acid Metabolism (CAM): A specialized form of photosynthesis found in about 6% of vascular plants. It is a carbon fixation pathway that evolved in some plants as an adaptation to arid conditions. In a plant using full CAM, the stomata in the leaves remain shut during the day to reduce evapotranspiration, but open at night to collect carbon dioxide (CO₂). The CO₂ is stored as the four-carbon acid malate in vacuoles at night, and then in the daytime, the malate is transported to chloroplasts where it is converted back to CO₂, which is then used during photosynthesis. The pre-collected CO₂ is concentrated around the enzyme RuBisCO, increasing photosynthetic efficiency. This metabolism was first studied in plants of the Crassulaceae family. These mainly include succulents. The first time it was studied, Crassula was used as a model organism.

[0069] DNA (deoxyribonucleic acid): DNA is a long chain polymer which comprises the genetic material of most organisms (some viruses have genes comprising ribonucleic acid (RNA)). The repeating units in DNA polymers are four different nucleotides, each of which comprises one of the four bases, adenine, guanine, cytosine and thymine bound to a deoxyribose sugar to which a phosphate group is attached. Triplets of nucleotides (referred to as codons) code for each amino acid in a polypeptide, or for a stop signal. The term codon is also used for the corresponding (and complementary) sequences of three nucleotides in the mRNA into which the DNA sequence is transcribed.

[0070] Unless otherwise specified, any reference to a DNA molecule includes the reverse complement of that DNA molecule. Except where single-strandedness is required by the text herein, DNA molecules, although written to depict only a single strand, encompass both strands of a double-stranded DNA molecule.

[0071] Encode: A polynucleotide is said to encode a polypeptide if, in its native state or when manipulated by methods known to those skilled in the art, the polynucleotide molecule can be transcribed and/or translated to produce a mRNA for and/or the polypeptide or a fragment thereof. The anti-sense strand is the complement of such a nucleic acid, and the encoding sequence can be deduced therefrom.

[0072] Enhancer domain: A cis-acting transcriptional regulatory element (a.k.a. cis-element) that confers an aspect of the overall control of gene expression. An enhancer domain may function to bind transcription factors, which are trans-acting protein factors that regulate transcription. Some enhancer domains bind more than one transcription factor, and transcription factors may interact with different affinities with more than one enhancer domain Enhancer domains can be identified by a number of techniques, including deletion analysis (deleting one or more nucleotides from the 5′ end or internal to a promoter); DNA binding protein analysis using DNase I foot printing, methylation interference, electrophoresis mobility-shift assays, in vivo genomic foot printing by ligation-mediated PCR, and other conventional assays; or by DNA sequence comparison with known cis-element motifs using conventional DNA sequence comparison methods. The fine structure of an enhancer domain can be further studied by mutagenesis (or substitution) of one or more nucleotides or by other conventional methods. Enhancer domains can be obtained by chemical synthesis or by isolation from promoters that include such elements, and they can be synthesized with additional flanking nucleotides that contain useful restriction enzyme sites to facilitate subsequence manipulation.

[0073] (Gene) Expression: Transcription of a DNA molecule into a transcribed RNA molecule. More generally, the processes by which a gene's coded information is converted into the structures present and operating in the cell. Expressed genes include those that are transcribed into mRNA and then translated into protein and those that are transcribed into RNA, but not translated into protein (for example, siRNA, transfer RNA and ribosomal RNA). Thus, expression of a target sequence, such as a gene or a promoter region of a gene, can result in the expression of an mRNA, a protein, or both. The expression of the target sequence can be inhibited or enhanced (decreased or increased). Gene expression may be described as related to temporal, spatial, developmental, or morphological qualities as well as quantitative or qualitative indications.

[0074] Gene regulatory activity: The ability of a polynucleotide to affect transcription or translation of an operably linked transcribable or translatable polynucleotide molecule. An isolated polynucleotide molecule having gene regulatory activity may provide temporal or spatial expression or modulate levels and rates of expression of the operably linked transcribable polynucleotide molecule. An isolated polynucleotide molecule having gene regulatory activity may include a promoter, intron, leader, or 3′ transcription termination region.

[0075] Heterologous: A type of sequence that is not normally (e.g., in the wild-type sequence) found adjacent to a second sequence. In one embodiment, the sequence is from a different genetic source, such as a virus or organism or species, than the second sequence.

[0076] Hybridization: Oligonucleotides and their analogs hybridize by hydrogen bonding, which includes Watson-Crick, Hoogsteen or reversed Hoogsteen hydrogen bonding, between complementary bases. Generally, nucleic acid consists of nitrogenous bases that are either pyrimidines (cytosine (C), uracil (U), and thymine (T)) or purines (adenine (A) and guanine (G)). These nitrogenous bases form hydrogen bonds between a pyrimidine and a purine, and the bonding of the pyrimidine to the purine is referred to as base pairing. More specifically, A will hydrogen bond to T or U, and G will bond to C. In RNA molecules, G also will bond to U. Complementary refers to the base pairing that occurs between two distinct nucleic acid sequences or two distinct regions of the same nucleic acid sequence.

[0077] Hybridization conditions resulting in particular degrees of stringency will vary depending upon the nature of the hybridization method of choice and the composition and length of the hybridizing nucleic acid sequences. Generally, the temperature of hybridization and the ionic strength (especially the Na concentration) of the hybridization buffer will determine the stringency of hybridization. Calculations regarding hybridization conditions required for attaining particular degrees of stringency are discussed by Sambrook et al. (ed.), Molecular Cloning: A Laboratory Manual, 2nd ed., vol. 1-3, Cold Spring Harbor Laboratory Press, Cold Spring Harbor, N.Y., 1989, chapters 9 and 11, herein incorporated by reference.

[0078] The following is an exemplary set of hybridization conditions and is not meant to be limiting.

Very High Stringency (Detects Sequences that Share 90% Sequence Identity)

[0079] Hybridization: 5×SSC at 65° C. for 16 hours Wash twice: 2×SSC at room temperature (RT) for 15 minutes each Wash twice: 0.5×SSC at 65° C. for 20 minutes each

High Stringency (Detects Sequences that Share 80% Sequence Identity or Greater)

[0080] Hybridization: 5×-6×SSC at 65° C.−70° C. for 16-20 hours

[0081] Wash twice: 2×SSC at RT for 5-20 minutes each

[0082] Wash twice: 1×SSC at 55° C.−70° C. for 30 minutes each

Low Stringency (Detects Sequences that Share Greater than 50% Sequence Identity)

[0083] Hybridization: 6×SSC at RT to 55° C. for 16-20 hours

[0084] Wash at least twice: 2×-3×SSC at RT to 55° C. for 20-30 minutes each.

[0085] In cis: Indicates that two sequences are positioned on the same piece of RNA or DNA.

[0086] In trans: Indicates that two sequences are positioned on different pieces of RNA or DNA.

[0087] Industrial crop: Crops grown primarily for consumption by humans or animals or for use in industrial processes (for example, as a source of fatty acids for manufacturing or sugars for producing alcohol). It will be understood that in many instances either the plant or a product produced from the plant (for example, sweeteners, oil, flour, or meal) can be consumed; thus, a subset of industrial crops are food crops. Examples of food crops include, but are not limited to, corn, soybean, rice, wheat, oilseed rape, tomato, cotton, oats, barley, tobacco, Camelina and potato plants. Other examples of industrial crops (including food crops) are listed herein.

[0088] Increased Expression: Gene upregulation includes any detectable increase in the production of a gene product. In certain examples, production of a gene product increases by at least 2-fold, for example at least 3-fold or at least 4-fold, as compared to a control (such an amount of gene expression in a wild-type cell).

[0089] Isolated: An “isolated” biological component (such as a nucleic acid, peptide or protein) has been substantially separated, produced apart from, or purified away from other biological components in the cell of the organism in which the component naturally occurs, e.g., other chromosomal and extrachromosomal DNA and RNA, and proteins. Nucleic acids, peptides and proteins which have been “isolated” thus include nucleic acids and proteins purified by standard purification methods. The term also embraces nucleic acids, peptides and proteins prepared by recombinant expression in a host cell as well as chemically synthesized nucleic acids.

[0090] Metabolome: The complement of relatively low molecular weight molecules (metabolites) that is present in a single organism, a sample, a tissue, a cell, or whatever other division is divided. By way of example, metabolomes may include metabolic intermediates, hormones and other signaling molecules, and secondary metabolites. Representative metabolomes comprise the complement of metabolites found within a biological sample, such as a plant, plant part, or plant sample, or in a suspension or extract thereof. Examples of such molecules include, but are not limited to: acids and related compounds; mono-, di-, and tri-carboxylic acids (saturated, unsaturated, aliphatic and cyclic, aryl, alkaryl); aldo-acids, keto-acids; lactone forms; gibberellins; abscisic acid; alcohols, polyols, derivatives, and related compounds; ethyl alcohol, benzyl alcohol, methanol; propylene glycol, glycerol, phytol; inositol, furfuryl alcohol, menthol; aldehydes, ketones, quinones, derivatives, and related compounds; acetaldehyde, butyraldehyde, benzaldehyde, acrolein, furfural, glyoxal; acetone, butanone; anthraquinone; carbohydrates; mono-, di-, tri-saccharides; alkaloids, amines, and other bases; pyridines (including nicotinic acid, nicotinamide); pyrimidines (including cytidine, thymine); purines (including guanine, adenine, xanthines/hypoxanthines, kinetin); pyrroles; quinolines (including isoquinolines); morphinans, tropanes, cinchonans; nucleotides, oligonucleotides, derivatives, and related compounds; guano sine, cytosine, adeno sine, thymidine, inosine; amino acids, oligopeptides, derivatives, and related compounds; esters; phenols and related compounds; heterocyclic compounds and derivatives; pyrroles, tetrapyrroles (corrinoids and porphines/porphyrins, w/w/o metal-ion); flavonoids; indoles; lipids (including fatty acids and triglycerides), derivatives, and related compounds; carotenoids, phytoene; and sterols, isoprenoids including terpenes.

[0091] Native or wild-type relative to a given plant trait or phenotype: A reference to the form in which that trait or phenotype is found in the same variety of plant in nature.

[0092] Nucleotide: The term nucleotide includes, but is not limited to, a monomer that includes a base linked to a sugar, such as a pyrimidine, purine or synthetic analogs thereof, or a base linked to an amino acid, as in a peptide nucleic acid (PNA). A nucleotide is one monomer in an oligonucleotide/polynucleotide. A nucleotide sequence refers to the sequence of bases in an oligonucleotide/polynucleotide.

[0093] The major nucleotides of DNA are deoxyadenosine 5′-triphosphate (dATP or A), deoxyguanosine 5′-triphosphate (dGTP or G), deoxycytidine 5′-triphosphate (dCTP or C) and deoxythymidine 5′-triphosphate (dTTP or T). The major nucleotides of RNA are adenosine 5′-triphosphate (ATP or A), guanosine 5′-triphosphate (GTP or G), cytidine 5′-triphosphate (CTP or C) and uridine 5′-triphosphate (UTP or U). Inosine is also a base that can be integrated into DNA or RNA in a nucleotide (dITP or ITP, respectively).

[0094] Oligonucleotide: An oligonucleotide is a plurality of nucleotides joined by phosphodiester bonds, between about 6 and about 300 nucleotides in length. An oligonucleotide analog refers to compounds that function similarly to oligonucleotides but have non-naturally occurring portions. For example, oligonucleotide analogs can contain non-naturally occurring portions, such as altered sugar moieties or inter-sugar linkages, such as a phosphorothioate oligodeoxynucleotide. Functional analogs of naturally occurring polynucleotides can bind to RNA or DNA

[0095] Operably linked: This term refers to a juxtaposition of components, particularly nucleotide sequences, such that the normal function of the components can be performed. Thus, a first nucleic acid sequence is operably linked with a second nucleic acid sequence when the first nucleic acid sequence is placed in a functional relationship with the second nucleic acid sequence. For instance, a promoter is operably linked to a coding sequence if the promoter affects the transcription or expression of the coding sequence. Generally, operably linked DNA sequences are contiguous and, where necessary to join two protein-coding regions, in the same reading frame. A coding sequence that is “operably linked” to regulatory sequence(s) refers to a configuration of nucleotide sequences wherein the coding sequence can be expressed under the regulatory control (e.g., transcriptional and/or translational control) of the regulatory sequences.

[0096] ORF (open reading frame): A series of nucleotide triplets (codons) coding for amino acids without any termination codons. These sequences are usually translatable into a peptide.

[0097] Plant: Any plant and progeny thereof. The term also includes parts of plants, including seed, cuttings, tubers, fruit, flowers, etc. In various embodiments, the term plant refers to cultivated plant species, such as corn, cotton, canola, sunflower, soybeans, sorghum, alfalfa, wheat, rice, plants producing fruits and vegetables, and turf and ornamental plant species. The term plant cell, as used herein, refers to the structural and physiological unit of plants, consisting of a protoplast and the surrounding cell wall. The term plant organ, as used herein, refers to a distinct and visibly differentiated part of a plant, such as root, stem, leaf or embryo. More generally, the term plant tissue refers to any tissue of a plant in planta or in culture. This term includes a whole plant, plant cell, plant organ, protoplast, cell culture, or any group of plant cells organized into a structural and functional unit. Plant height. Plant height is taken from the top of the soil to the tip of the plant, and is typically measured in centimeters or inches. Plant parts. Includes protoplasts, leaves, stems, roots, root tips, anthers, pistils, seed, embryo, pollen, ovules, cotyledon, hypocotyl, flower, shoot, tissue, petiole, cells, calli, pods, meristematic cells and the like. Includes plant cells of a tissue culture from which soybean plants can be regenerated.

[0098] Polynucleotide molecule: Single- or double-stranded DNA or RNA of genomic or synthetic origin; that is, a polymer of deoxyribonucleotide or ribonucleotide bases, respectively, read from the 5′ (upstream) end to the 3′ (downstream) end.

[0099] Polypeptide molecule: A polymer in which the monomers are amino acid residues which are joined together through amide bonds. When the amino acids are alpha-amino acids, either the L-optical isomer or the D-optical isomer can be used, the L-isomers being preferred. The term polypeptide or protein as used herein encompasses any amino acid sequence and includes modified sequences such as glycoproteins. The term polypeptide is specifically intended to cover naturally occurring proteins, as well as those that are recombinantly or synthetically produced.

[0100] Progeny. Offspring; descendants.

[0101] Promoter: An array of nucleic acid control sequences which direct transcription of a nucleic acid, by recognition and binding of e.g., RNA polymerase II and other proteins (trans-acting transcription factors) to initiate transcription. A promoter includes necessary nucleic acid sequences near the start site of transcription, such as, in the case of a polymerase II type promoter, a TATA element. Minimally, a promoter typically includes at least an RNA polymerase binding site together and may also include one or more transcription factor binding sites which modulate transcription in response to occupation by transcription factors. Representative examples of promoters (and elements that can be assembled to produce a promoter) are described herein. Promoters may be defined by their temporal, spatial, or developmental expression pattern.

[0102] A plant promoter is a native or non-native promoter that is functional in plant cells.

[0103] Protein: A biological molecule, for example a polypeptide, expressed by a gene and comprised of amino acids.

[0104] Protoplast: An isolated plant cell without a cell wall, having the potential for being transformed and/or regeneration into cell culture or a whole plant.

[0105] Purified: The term purified does not require absolute purity; rather, it is intended as a relative term. Thus, for example, a purified fusion protein preparation is one in which the fusion protein is more enriched than the protein is in its generative environment, for instance within a cell or in a biochemical reaction chamber. Preferably, a preparation of fusion protein is purified such that the fusion protein represents at least 50% of the total protein content of the preparation.

[0106] Recombinant: A recombinant nucleic acid is one that has a sequence that is not naturally occurring or has a sequence that is made by an artificial combination of two otherwise separated segments of sequence. This artificial combination is often accomplished by chemical synthesis or, more commonly, by the artificial manipulation of isolated segments of nucleic acids, e.g., by genetic engineering techniques.

[0107] Similarly, a recombinant protein is one encoded for by a recombinant nucleic acid molecule.

[0108] Regulatable promoter: A promoter with activity of which is regulated (directly or indirectly) by an agent, such as a transcription factor, a chemical compound, an environmental condition, or a nucleic acid molecule.

[0109] Regulating gene expression: Processes of controlling the expression of a gene by increasing or decreasing the expression, production, or activity of an agent that affects gene expression. The agent can be a protein, such as a transcription factor, or a nucleic acid molecule which when in contact with the gene or its upstream regulatory sequences, or a mRNA encoded by the gene, either increases or decreases gene expression.

[0110] Regulatory sequences or elements: These terms refer generally to a class of polynucleotide molecules (such as DNA molecules, having DNA sequences) that influence or control transcription or translation of an operably linked transcribable polynucleotide molecule, and thereby expression of genes. Included in the term are promoters, enhancers, leaders, introns, locus control regions, boundary elements/insulators, silencers, matrix attachment regions (also referred to as scaffold attachment regions), repressor, transcriptional terminators (also known as transcription termination regions), origins of replication, centromeres, and meiotic recombination hotspots. Promoters are sequences of DNA near the 5′ end of a gene that act as a binding site for RNA polymerase, and from which transcription is initiated. Enhancers are control elements that elevate the level of transcription from a promoter, usually independently of the enhancer's orientation or distance from the promoter. Locus control regions (LCRs) confer tissue-specific and temporally regulated expression to genes to which they are linked. LCRs function independently of their position in relation to the gene, but are copy-number dependent. It is believed that they function to open the nucleosome structure, so other factors can bind to the DNA. LCRs may also affect replication timing and origin usage. Insulators (also known as boundary elements) are DNA sequences that prevent the activation (or inactivation) of transcription of a gene, by blocking effects of surrounding chromatin. Silencers and repressors are control elements that suppress gene expression; they act on a gene independently of their orientation or distance from the gene. Matrix attachment regions (MARs), also known as scaffold attachment regions, are sequences within DNA that bind to the nuclear scaffold. They can affect transcription, possibly by separating chromosomes into regulatory domains. It is believed that MARs mediate higher-order, looped structures within chromosomes. Transcriptional terminators are regions within the gene vicinity that RNA polymerase is released from the template. Origins of replication are regions of the genome that, during DNA synthesis or replication phases of cell division, begin the replication process of DNA. Meiotic recombination hotspots are regions of the genome that recombine more frequently than the average during meiosis. Specific nucleotides within a regulatory region may serve multiple functions. For example, a specific nucleotide may be part of a promoter and participate in the binding of a transcriptional activator protein.

[0111] Isolated regulatory elements that function in cells (for instance, in plants or plant cells) are useful for modifying plant phenotypes, for instance through genetic engineering.

[0112] RNA: A typically linear polymer of ribonucleic acid monomers, linked by phosphodiester bonds. Naturally occurring RNA molecules fall into three general classes, messenger (mRNA, which encodes proteins), ribosomal (rRNA, components of ribosomes), and transfer (tRNA, molecules responsible for transferring amino acid monomers to the ribosome during protein synthesis). Messenger RNA includes heteronuclear (hnRNA) and membrane-associated polysomal RNA (attached to the rough endoplasmic reticulum). Total RNA refers to a heterogeneous mixture of all types of RNA molecules.

[0113] Regeneration. The development of a plant from tissue culture. The cells may, or may, not have been genetically modified. Plant tissue culture relies on the fact that all plant cells have the ability to generate a whole plant (totipotency). Single cells (protoplasts), pieces of leaves, or roots can often be used to generate a new plant on culture media given the required nutrients and plant hormones.

[0114] Seed. The part of a flowering plant that typically contains the embryo with its protective coat and stored food and that can develop into a new plant under the proper conditions; fertilized and mature ovule.

[0115] Seed quality: The visual rating of the completeness of the seed. The score is based on the completeness of the seed coat and overall soundness of the seed. Scores range from 1 to 5, with a score of 1 indicating good quality seed and a score of 5 indicating the seeds are of poor quality.

[0116] Seed yield: The yield in bushels/acre (bu/a) and is the actual yield of the grain at harvest.

[0117] Sequence identity: The similarity between two nucleic acid sequences, or two amino acid sequences is expressed in terms of the similarity between the sequences, otherwise referred to as sequence identity. Sequence identity is frequently measured in terms of percentage identity (or similarity or homology); the higher the percentage, the more similar the two sequences are. Homologs of the sequences referenced or disclosed herein will possess a relatively high degree of sequence identity when aligned using standard methods.

[0118] Methods of alignment of sequences for comparison are well known in the art. Various programs and alignment algorithms are described in: Smith and Waterman (Adv. Appl. Math. 2: 482, 1981); Needleman and Wunsch (J. Mol. Biol. 48: 443, 1970); Pearson and Lipman (PNAS. USA 85: 2444, 1988); Higgins and Sharp (Gene, 73: 237-244, 1988); Higgins and Sharp (CABIOS 5: 151-153, 1989); Corpet et al. (Nuc. Acids Res. 16: 10881-90, 1988); Huang et al. (Comp. Appls Biosci. 8: 155-65, 1992); and Pearson et al. (Methods in Molecular Biology 24: 307-31, 1994). Altschul et al. (Nature Genet., 6: 119-29, 1994) presents a detailed consideration of sequence alignment methods and homology calculations.

[0119] The alignment tools ALIGN (Myers and Miller, CABIOS 4: 11-17, 1989) or LFASTA (Pearson and Lipman, 1988) may be used to perform sequence comparisons (Internet Program ©1996, W. R. Pearson and the University of Virginia, “fasta20u63” version 2.0u63, release date December 1996). ALIGN compares entire sequences against one another, while LFASTA compares regions of local similarity. These alignment tools and their respective tutorials are available on the Internet at biology.ncsa.uiuc.edu.

[0120] Orthologs or paralogs (more generally, homologs) of the disclosed sequences are typically characterized by possession of greater than 75% sequence identity counted over the full-length alignment with the sequence to which they are compared using ALIGN set to default parameters. Sequences with even greater similarity to the reference sequences will show increasing percentage identities when assessed by this method, such as at least 80%, at least 85%, at least 90%, at least 92%, at least 95%, or at least 98% sequence identity. In addition, sequence identity can be compared over the full length of one or both binding domains of the disclosed fusion proteins. In such an instance, percentage identities will be essentially similar to those discussed for full-length sequence identity.

[0121] When significantly less than the entire sequence is being compared for sequence identity, homologs will typically possess at least 80% sequence identity over short windows of 10-20 amino acids, and may possess sequence identities of at least 85%, at least 90%, at least 95%, or at least 99% depending on their similarity to the reference sequence. Sequence identity over such short windows can be determined using LFASTA; methods can be found at World Wide Web address biology.ncsa.uiuc.edu.

[0122] One of skill in the art will appreciate that these sequence identity ranges are provided for guidance only; it is entirely possible that strongly significant homologs could be obtained that fall outside of the ranges provided.

[0123] An alternative indication that two nucleic acid molecules are closely related is that the two molecules hybridize to each other under stringent conditions. Stringent conditions are sequence-dependent and are different under different environmental parameters. Generally, stringent conditions are selected to be about 5° C. to 20° C. lower than the thermal melting point (Tm) for the specific sequence at a defined ionic strength and pH. The Tₘ is the temperature (under defined ionic strength and pH) at which 50% of the target sequence hybridizes to a perfectly matched probe. Conditions for nucleic acid hybridization and calculation of stringencies can be found in Sambrook et al. (In Molecular Cloning: A Laboratory Manual, Cold Spring Harbor, N.Y., 1989) and Tijssen (Laboratory Techniques in Biochemistry and Molecular Biology Part I, Ch. 2, Elsevier, New York, 1993). Nucleic acid molecules that hybridize under stringent conditions typically hybridize to a probe based on either the entire fusion protein encoding sequence, an entire binding domain, or other selected portions of the encoding sequence under wash conditions of 0.2×SSC, 0.1% SDS at 65° C.

[0124] Nucleic acid sequences that do not show a high degree of identity may nevertheless encode similar amino acid sequences, due to the degeneracy of the genetic code. It is understood that changes in nucleic acid sequence can be made using this degeneracy to produce multiple nucleic acid sequences that each encode substantially the same protein.

[0125] Tissue culture: A composition that includes isolated cells of the same or a different type or a collection of such cells organized into parts of a plant.

[0126] Transcription: The production of an RNA molecule by RNA polymerase as a complementary copy of a DNA sequence.

[0127] Transcription termination region: Sequences that control formation of the 3′ end of a transcript. Self-cleaving ribozymes and polyadenylation sequences are examples of transcription termination sequences.

[0128] Transformation: Process by which exogenous DNA enters and changes a recipient cell. It may occur under natural conditions, or artificial conditions using various methods well known in the art. Transformation may rely on any known method for the insertion of foreign nucleic acid sequences into a prokaryotic or eukaryotic host cell. Selection of the method is influenced by the host cell being transformed and may include, but is not limited to, viral infection, Agrobacterium-mediated gene transfer, electroporation, lipofection, and particle bombardment.

[0129] Transformed: A transformed cell is a cell into which has been introduced a nucleic acid molecule by molecular biology techniques. Transformed cells include stably transformed cells in which the inserted DNA is capable of replication either as an autonomously replicating plasmid or as part of the host chromosome. They also include cells that transiently express the inserted DNA or RNA for limited periods of time. As used herein, the term transformation encompasses all techniques by which a nucleic acid molecule might be introduced into such a cell, including transfection with viral vectors, transformation with plasmid vectors, and introduction of naked DNA by electroporation, lipofection, and particle gun acceleration.

[0130] Transgene. A gene or genetic material that has been transferred into the genome of a plant, for example by genetic engineering methods. Exemplary transgenes include cDNA (complementary DNA) segment, which is a copy of mRNA (messenger RNA), and the gene itself residing in its original region of genomic DNA. In one example, describes a segment of DNA containing a gene sequence that is introduced into the genome of a plant or plant cell. This non-native segment of DNA may retain the ability to produce RNA or protein in the transgenic plant, or it may alter the normal function of the transgenic plant's genetic code. In general, the transferred nucleic acid is incorporated into the plant's germ line. Transgene can also describe any DNA sequence, regardless of whether it contains a gene coding sequence or it has been artificially constructed, which has been introduced into a plant or vector construct in which it was previously not found.

[0131] Transgenic: This term refers to a plant/cell/other entity or organism that contains recombinant genetic material not normally found in entities of this type/species (that is, heterologous genetic material) and which has been introduced into the entity in question (or into progenitors of the entity) by human manipulation. Thus, a plant that is grown from a plant cell into which recombinant DNA is introduced by transformation (a transformed plant cell) is a transgenic plant, as are all offspring of that plant that contain the introduced transgene (whether produced sexually or asexually).

[0132] Transgenic plant: A plant that contains a foreign (heterologous) nucleotide sequence inserted into either its nuclear genome or organellar genome.

[0133] Transposon: A nucleotide sequence such as a DNA or RNA sequence that is capable of transferring location or moving within a gene, a chromosome or a genome. Vector: A nucleic acid molecule as introduced into a host cell, thereby producing a transformed host cell. A vector may include nucleic acid sequences that permit it to replicate in the host cell, such as an origin of replication. A vector may also include one or more therapeutic genes and/or selectable marker genes and other genetic elements known in the art. A vector can transduce, transform or infect a cell, thereby causing the cell to express nucleic acids and/or proteins other than those native to the cell. A vector optionally includes materials to aid in achieving entry of the nucleic acid into the cell, such as a viral particle, liposome, protein coating or the like.

### III. Description of Several Embodiments

[0134] A. Methods and Compositions

[0135] Methods of altering CAM pathways in plants are disclosed herein. In some examples, the method comprises overexpressing one or more genes encoding one or more enzymes that carry out the basic biochemical sequence of nocturnal CO₂ fixation (carboxylation) into C₄ acids (malate), store C₄ acids in the vacuole of the plant, and/or then decarboxylate and refix the released CO₂ by C₃ photosynthesis during the subsequent day in a plant cell, thereby altering CAM in the plant cell.

[0136] In some embodiments, a method comprises overexpressing one or more genes involved in carboxylation, one or more genes involved in decarboxylation, and/or one or more genes encoding malate transport functions in a plant cell, thereby altering CAM in the plant cell. In one embodiment, the one or more genes comprise McBca2 (Beta carbonic anhydrase 2), McPpck (phosphoenolpyruvate carboxylase kinase), McPpc1 (phosphoenolpyruvate carboxylase), McNAD-Mdh2 [NAD(P) malate dehydrogenase 2], McALMT4 (putative aluminum-activated malate transporter for tonoplast localization), MctDT (tonoplast dicarboxylate transporter), McNADP-ME3 (NADP-dependent malic enzyme 3), McPpdk1 (pyruvate orthophosphate dikinase), and/or McPpdk-RP (pyruvate orthophosphate dikinase-regulatory protein). In some examples, the sequence includes full-length wild-type (or native) sequence, as well as allelic variants, fragments, homologs or fusion sequences that retain the ability to be expressed at increased levels in a plant cell and regulate CAM, such as increase CAM. In certain examples, the sequence has at least 80% sequence identity, for example at least 85%, at least 91%, at least 92%, at least 93%, at least 94%, at least 95%, at least 96%, at least 97%, at least 98%, or at least 99% sequence identity to a wild-type sequence for McBca2 (Beta carbonic anhydrase 2; SEQ ID NO: 1; GenBank sequence ID: JN228099.1 hereby incorporated by reference as available on Jan. 6, 2017), McPpck (phosphoenolpyruvate carboxylase kinase; SEQ ID NO: 2; GenBank sequence ID: AF158091.1 hereby incorporated by reference as available on Jan. 6, 2017), McPpc1 (phosphoenolpyruvate carboxylase; SEQ ID NO: 3; GenBank sequence ID: X13660.1 hereby incorporated by reference as available on Jan. 6, 2017), McNAD-Mdh2 [NAD(P) malate dehydrogenase 2] (SEQ ID NO: 4; GenBank sequence ID: X96539.1 hereby incorporated by reference as available on Jan. 6, 2017), McALMT4 (putative aluminum-activated malate transporter; SEQ ID NO: 5; GenBank sequence ID: XM_019002905.1 hereby incorporated by reference as available on Jan. 6, 2017), MctDT (tonoplast dicarboxylate transporter; SEQ ID NO: 6; GenBank sequence ID: XM_010688412.2 hereby incorporated by reference as available on Jan. 6, 2017), McNADP-ME3 (NADP-dependent malic enzyme 3; SEQ ID NO: 7; GenBank sequence ID: X64434.1 hereby incorporated by reference as available on Jan. 6, 2017), McPpdk1 (pyruvate orthophosphate dikinase; SEQ ID NO: 8; GenBank sequence ID: X78347.1 hereby incorporated by reference as available on Jan. 6, 2017), and/or McPpdk-RP (pyruvate orthophosphate dikinase-regulatory protein; SEQ ID NO: 9; GenBank sequence ID: XM_010054134.2 hereby incorporated by reference as available on Jan. 6, 2017). In some embodiments, a disclosed polynucleotide sequence is one provided in Tables 1-5. In some embodiments, the method further comprises overexpressing one or more tissue succulent regulating factors, such as overexpressing a modified basic helix-loop-helix transcription factor CEB1, such as a codon optimized CEB1 or functional fragment thereof as disclosed in Application No. 62/255,158, filed on Nov. 13, 2015 and PCT/US2016/06177, filed on Nov. 13, 2016, each of which is hereby incorporated by reference in its entirety.

[0137] In some embodiments, the method comprises overexpression one or more genes involved in carboxylation (e.g., McBca2, McPpc1, McPpck, and McNAD-Mdh2), one or more genes involved in decarboxylation module (e.g., McNADP-ME3, McPpdk1, and McPpdk-RP), and one or more genes involved in malate transport functions (McALMT4 and MctDT). In some examples, the method comprises overexpression of four genes involved in carboxylation (McBca2, McPpc1, McPpck, and McMdh2), three genes involved in decarboxylation module (McNADP-ME3, McPpdk1, and McPpdk-RP), and two genes encoding malate transport functions (McALMT4 and MctDT).

[0138] In some embodiments, a method includes operably linking a disclosed polynucleotide sequence to a circadianly-controlled 5′ regulatory region, such as an Arabidopsis thaliana promoter that confers the correct temporal expression pattern necessary to carry out the proper biochemical sequence of enzymatic reactions and transport steps. For example, each promoter confers increased expression of their respective transgene under conditions of water-deficit stress so that the CAM pathway is operational largely under water-deficit conditions.

[0139] In some embodiments, a disclosed polynucleotide sequence comprises a gypsy barrier insulators which prevent transcriptional interference from adjacent transcriptional cassettes and gene silencing, were included into each expression cassette to prevent or decrease transgene silencing. In some embodiments, a disclosed polynucleotide can further comprise a unique epitope tag to monitor transgene expression within the plant.

[0140] In embodiments, the method includes inserting a disclosed CAM regulating nucleic acid sequence into a vector construct and transforming the plant cell with the generated vector construct.

[0141] In some embodiments, a disclosed vector construct comprises a full-length wild-type (or native) sequence, allelic variants, fragments, homologs or fusion sequences that retains the ability to be expressed at increased levels in a plant cell, such as a polynucleotide sequence has at least 80% sequence identity, for example at least 85%, 90%, 95%, or 98% sequence identity to a wild-type sequence encoding McBca2 (Beta carbonic anhydrase 2), McPpck (phosphoenolpyruvate carboxylase kinase), McPpc1 (phosphoenolpyruvate carboxylase), McNAD-Mdh2 [NAD(P) malate dehydrogenase 2], McALMT4 (putative aluminum-activated malate transporter), MctDT (tonoplast dicarboxylate transporter), McNADP-ME3 (NADP-dependent malic enzyme 3), McPpdk1 (pyruvate orthophosphate dikinase), and/or McPpdk-RP (pyruvate orthophosphate dikinase-regulatory protein).

[0142] To routinely identify biologically active proteins, amino acid substitutions may be based on any characteristic known in the art, including the relative similarity or differences of the amino acid side-chain substituents, for example, their hydrophobicity, hydrophilicity, charge, size, and the like. Generally, nucleotide sequence variants will encode a protein have at least 80% sequence identity to the protein encoded by a disclosed nucleic acid, such as a nucleic acid sequence at least 80%, at least 85%, at least 90%, at least 91%, at least 92%, at least 93%, at least 94%, at least 95%, at least 96%, at least 97%, at least 98% or at least 99% sequence identity or even greater to the protein encoded by its respective reference nucleotide sequence.

[0143] In some embodiments, a disclosed nucleic acid encodes a functional fragment of a CAM regulatory protein. Such functional fragments still exhibit CAM regulatory activity. Functional fragments include proteins in which residues at the N-terminus, C-terminus and/or internal to the full-length protein have been deleted. For example, a deletion of less than about 50, 40, 30, 25, 20, 15, 10, 5, 4, 3, 2, or 1 amino acids from the N-terminus, C-terminus and/or internal loops can be made while maintaining the active site with minimal testing and/or experimentation to determine the activity of the resultant protein. Also disclosed are isolated proteins that have at least 80% sequence homology to the polypeptide encoded by a nucleic acid with nucleic acid sequence set forth by one of SEQ ID NOs:1-9 or a degenerate nucleic acid, such as a nucleic acid sequence at least 80%, at least 85%, at least 90%, at least 91%, at least 92%, at least 93%, at least 94%, at least 95%, at least 96%, at least 97%, at least 98%, or at least 99% sequence identity or even greater to the protein encoded by a nucleic acid sequence set forth by one of SEQ ID NOs: 1-9.

[0144] The disclosed nucleotide sequences, including one having at least 80% sequence homologs to the nucleic acid sequence set forth by one of SEQ ID NOs: 1-9, such as at least 80%, at least 85%, at least 90%, at least 91%, at least 92%, at least 93%, at least 94%, at least 95%, at least 96%, at least 97%, at least 98% or at least 99% to the nucleic acid sequence set forth by one of SEQ ID NOs: 1-9 or a degenerate, or functional fragment thereof, are useful in the genetic manipulation plant cells when operably linked with a promoter, such as an indictable or constitutive promoter. In this manner, the nucleotide sequences are provided in expression cassettes for expression in the plant of interest. Such expression cassettes will typically comprise a transcriptional initiation region comprising a promoter nucleotide sequence operably linked to one or more of the disclosed nucleic acids or variants thereof. Such an expression cassette can be provided with a plurality of restriction sites for insertion of the nucleotide sequence to be under the transcriptional regulation of the regulatory regions. The expression cassette may additionally contain selectable marker genes or sequences. The expression cassettes of this disclosure can be part of and an expression vector, such as a plasmid.

[0145] In some embodiments, the transcriptional cassette will include in the 5′-to-3′ direction of transcription, a transcriptional and translational initiation region, a nucleic acid sequence encoding a CAM regulatory protein or functional fragment thereof, and a transcriptional and translational termination region functional in plant cells. The termination region may be native with the transcriptional initiation region, may be native with the CEB1, or may be derived from another source. Convenient termination regions are available from the Ti-plasmid of A. tumefaciens, such as the octopine synthase and nopaline synthase termination regions. See also, Guerineau et al., Mol. Gen. Genet. 262:141-144, 1991; Proudfoot Cell 64:671-674, 1991; Sanfacon et al., Genes Dev. 5:141-149, 1991; Mogen et al., Plant Cell 2:1261-1272, 1990; Munroe et al., Gene 91:151-158, 1990; Ballas et al., Nucleic Acids Res. 17:7891-7903, 1989; Joshi et al., Nucleic Acid Res. 15:9627-9639, 1987.

[0146] An expression cassette including a disclosed nucleic acid sequence operably linked to a promoter sequence may also contain at least additional nucleotide sequence for a gene to be co-transformed into the organism. Alternatively, the additional sequence(s) can be provided on another expression cassette. Additional sequence modifications are known to enhance gene expression in a cellular host. These include elimination of sequences encoding spurious polyadenylation signals, exon-intron splice site signals, transposon-like repeats, and other such well-characterized sequences that may be deleterious to gene expression. The G-C content of the heterologous nucleotide sequence may be adjusted to levels average for a given cellular host, as calculated by reference to known genes expressed in the host cell. When possible, the sequence is modified to avoid predicted hairpin secondary mRNA structures.

[0147] The expression cassettes may additionally contain 5′ leader sequences in the expression cassette construct. Such leader sequences can act to enhance translation. Translation leaders are known in the art and include: picornavirus leaders, for example, EMCV leader (Encephalomyocarditis 5′ noncoding region) (Elroy-Stein et al., Proc. Nat. Acad. Sci. USA 86:6126-6130, 1989); potyvirus leaders, for example, TEV leader (Tobacco Etch Virus); MDMV leader (Maize Dwarf Mosaic Virus); human immunoglobulin heavy-chain binding protein (BiP) (Macejak and Sarnow Nature 353:90-94, 1991); untranslated leader from the coat protein mRNA of alfalfa mosaic virus (AMV RNA 4) (Jobling and Gehrke Nature 325:622-625, 1987); tobacco mosaic virus leader (TMV) (Gallie et al. Molecular Biology of RNA, pages 237-256, 1989; and maize chlorotic mottle virus leader (MCMV) (Lommel et al., Virology 81:382-385, 1991). See also Della-Cioppa et al., Plant Physiology 84:965-968, 1987. Other methods known to enhance translation and/or mRNA stability can also be utilized, for example, introns, and the like.

[0148] In some embodiments, a disclosed isolated polynucleotide sequences comprises a plant promoter and a polynucleotide sequence involved in CAM regulation, such as a modified nucleic sequence sharing at least 80%, at least 85%, at least 90%, at least 91%, at least 92%, at least 93%, at least 94%, at least 95%, at least 96%, at least 97%, at least 98%, or at least 99% sequence identity or even greater to a nucleic acid sequence set forth by one of SEQ ID NOs: 1-9, and is capable of regulating CAM. In some examples, the polynucleotide sequence comprises the plant promoter is CaMV35S operably linked to a disclosed nucleic acid sequence. Numerous promoters useful for heterologous gene expression are available including, but not limited to, E4 (U.S. Pat. Nos. 5,783,393 and 5,783,394), CaMV19S, CaMVV1, Act1, Ubi1, or CsVMV promoters.

[0149] In those instances where it is desirable to have the expressed product directed to a particular organelle, such as the chloroplast or mitochondrion, or secreted at the cell's surface or extracellularly, the expression cassette may further comprise a coding sequence for a transit peptide. Such transit peptides are well known in the art and include, but are not limited to, the transit peptide for the acyl carrier protein, the small subunit of RUBISCO, plant EPSP synthase, and the like.

[0150] In preparing the expression cassette, the various DNA fragments may be manipulated by methods known in the art, so as to provide for the DNA sequences in the proper orientation and, as appropriate, in the proper reading frame. Toward this end, adapters or linkers may be employed to join the DNA fragments or other manipulations may be involved to provide for convenient restriction sites, removal of superfluous DNA, removal of restriction sites, or the like. For this purpose, in vitro mutagenesis, primer repair, restriction, annealing, resubstitutions, for example, transitions and transversions, may be involved.

[0151] The expression cassettes may include reporter genes or selectable marker genes. Examples of suitable reporter genes known in the art can be found in, for example, Jefferson et al. in Plant Molecular Biology Manual, ed. Gelvin et al. (Kluwer Academic Publishers), pp. 1-33, 1991; DeWet et al., Mol. Cell. Biol. 7:725-737, 1987; Goff et al., EMBO J. 9:2517-2522, 1990; and Kain et al., BioTechniques 19:650-655, 1995; and Chiu et al., Current Biology 6:325-330, 1996. Selectable marker genes for selection of transformed cells or tissues can include genes that confer antibiotic resistance or resistance to herbicides. Examples of suitable selectable marker genes include, but are not limited to, genes encoding resistance to chloramphenicol (Herrera Estrella et al., EMBO J. 2:987-992, 1983); methotrexate (Herrera Estrella et al., Nature 303:209-213, 1983; Meijer et al., Plant Mol. Biol. 16:807-820, 1991); hygromycin (Waldron et al., Plant Mol. Biol. 5:103-108, 1985; Zhijian et al., Plant Science 108:219-227, 1995); streptomycin (Jones et al., Mol. Gen. Genet. 210:86-91, 1987); spectinomycin (Bretagne-Sagnard et al., Transgenic Res. 5:131-137, 1996); bleomycin (Hille et al., Plant Mol. Biol. 7:171-176, 1990); sulfonamide (Guerineau et al., Plant Mol. Biol. 15:127-136, 1990); bromoxynil (Stalker et al., Science 242:419-423, 1988); glyphosate (Shaw et al., Science 233:478-481, 1986); and phosphinothricin (DeBlock et al., EMBO J. 6:2513-2518, 1987).

[0152] Other genes that could serve utility in the recovery of transgenic events but might not be required in the final product would include, but are not limited to, such examples as GUS (β-glucuronidase; Jefferson Plant Mol. Biol. Rep. 5:387, 1987), GFP and other related fluorescent proteins, and luciferase.

[0153] Plant transformation vectors comprising a disclosed isolated polynucleotide sequence are also provided. Moreover, transgenic plant cells, plant part, and plants comprising a disclosed vector construct whereby the transgenic plant has increased expression levels of one or more CAM regulatory proteins as compared to a control plant resulting in enhanced tissue succulence relative to control plants are provided.

[0154] In some embodiments, exemplary vector constructs comprises one or more such sequences under the control of a circadian promoter. In some embodiments, exemplary vector constructs further comprise one or more a gypsy barrier insulators and/or one or more unique epitope tags.

[0155] In some examples, a disclosed vector construct nucleic sequence shares at least 90% sequence identity, such as about 93%, 94%, 95%, 96%, 97%, 98% or 99% sequence identity to SEQ ID NOs: 15-68 and is capable of enhancing a CAM property.

[0156] In some embodiments, the method further comprises combining one or more vector constructs, such one, two, three, four, five, six, seven, eight, nine or more vector constructs into a series of complex gene circuits using the Gibson assembly approach. For example, an exemplary CAM gene circuit containing 9 CAM gene cassettes in provided in SEQ ID NO: 69.

[0157] The disclosed methods can be used to improve the drought durability of plants, such as in plants in arid environments, and also enhance the ability of plants to perform. In some examples, a disclosed method is used to increase plant cell size, leaf size, leaf number, reduce hypocotyl length, increase hypocotyl length, increase inflorescence width, increase inflorescence height, increase plant root size, increase plant root length, increase plant tissue succulence, increase plant water content, increase plant flower size, increase plant floral organ size, increase plant silique or ear size, increase fruit size, increase plant seed size, increase plant seed area, increase plant mass, increase plant seed number, increase plant total seed production; increase plant inflorescence number, or any combination thereof. In some examples, an increase is an at least 1.2 fold increase, such as at least 1.5 or an at least 2 fold increase, including between a 1.2 to 1.5 fold increase, a 1.3 to a 1.6 fold increase, a 1.2 to a 2 fold, including 1.2, 1.3, 1.4, 1.5, 1.6, 1.7, 1.8, 1.9, 2.0, 2.5, 3.0, 3.5, 4.0, 4.5 or 5 fold increase as compared to property of interest in a control plant.

[0158] In some examples, the method is used to generate a plant with improved water-use efficiency and drought tolerance. In some embodiments, a disclosed method for engineered CAM is combined with engineered tissue succulence, in order to improve the overall operational efficiency of the CAM pathway by limited the diffusion of CO₂ from leaf tissues during the daytime decarboxylation phases of the CAM cycle.

[0159] Plant transformation vectors comprising a disclosed isolated polynucleotide sequence are also provided. Moreover, transgenic plant cells, plant part, and plants comprising one or more disclosed vector constructs whereby the transgenic plant has increased expression levels of one or more genes involved in CAM as compared to a control plant resulting in enhanced CAM activity relative to control plants are provided.

[0160] A wide variety of transformation techniques exist in the art, and new techniques are continually becoming available. Any technique that is suitable for the target host plant can be employed within the scope of the present disclosure. For example, the constructs can be introduced in a variety of forms including, but not limited to as a strand of DNA, in a plasmid, or in an artificial chromosome. The introduction of the constructs into the target plant cells can be accomplished by a variety of techniques, including, but not limited to Agrobacterium-mediated transformation, electroporation, microinjection, microprojectile bombardment calcium-phosphate-DNA co-precipitation or liposome-mediated transformation of a heterologous nucleic acid construct comprising the desired coding sequence. The transformation of the plant is preferably permanent, i.e. by integration of the introduced expression constructs into the host plant genome, so that the introduced constructs are passed onto successive plant generations.

[0161] In one embodiment, binary based vector systems may be used to transfer and confirm the association between enhanced expression of an identified gene with a particular plant trait or phenotype. Standard Agrobacterium binary vectors are known to those of skill in the art and many are commercially available. In some examples, the binary vectors pGWB415 and pGWB402 are employed.

[0162] The optimal procedure for transformation of plants with Agrobacterium vectors will vary with the type of plant being transformed. Exemplary methods for Agrobacterium-mediated transformation include transformation of explants of hypocotyl, shoot tip, stem or leaf tissue, derived from sterile seedlings and/or plantlets. Such transformed plants may be reproduced sexually, or by cell or tissue culture. Agrobacterium transformation has been previously described for a large number of different types of plants and methods for such transformation may be found in the scientific literature.

[0163] Depending upon the intended use, a heterologous nucleic acid construct may be made which comprises a nucleic acid sequence, and which encodes the entire protein, or a biologically active portion thereof for transformation of plant cells and generation of transgenic plants.

[0164] B. Expression

[0165] The expression of the desired nucleic acid sequence or an ortholog, homologue, variant or fragment thereof may be carried out under the control of a constitutive, inducible or regulatable promoter. In some cases expression of a disclosed nucleic acid sequence or homologue, variant or fragment thereof may regulated in a developmental stage or tissue-associated or tissue-specific manner. Accordingly, expression of the nucleic acid coding sequences described herein may be regulated with respect to the level of expression, the tissue type(s) where expression takes place and/or developmental stage of expression leading to a wide spectrum of applications wherein the expression of a disclosed coding sequence is modulated in a plant.

[0166] Strong promoters with enhancers may result in a high level of expression.

[0167] Expression of a desired nucleic acid sequence or homologue, variant or fragment thereof may also be controlled at the level of transcription, by the use of cell type specific promoters or promoter elements in the plant expression vector.

[0168] Standard molecular and genetic tests may be performed to analyze the association between a cloned gene and an observed phenotype. A number of other techniques that are useful for determining (predicting or confirming) the function of a gene or gene product in plants are described below in the Examples.

[0169] The present disclosure describes nucleic acids encoding proteins obtained from various plant species, such as set forth in SEQ ID NOs: 1-9 or functional fragment thereof. Also provided are DNA constructs comprising the described nucleic acids. Host cells including a disclosed nucleic acid are also provided as well as methods of producing proteins from such host cells. In one embodiment, the disclosed nucleic acids confer an agronomic trait to a plant in which it is expressed, for example regulation of tissue succulence. The nucleic acids disclosed herein include recombinant DNA which is incorporated into a vector; into an autonomously replicating plasmid or virus; or into the genomic DNA of a prokaryote or eukaryote, or which exists as a separate molecule (for example, a cDNA) independent of other sequences. DNA sequences encoding desired proteins can be expressed in vitro by DNA transfer into a suitable host cell. The cell may be prokaryotic or eukaryotic. The term also includes any progeny of the subject host cell. It is understood that all progeny may not be identical to the parental cell because there may be mutations that occur during replication. Methods of stable transfer, meaning that the foreign DNA is continuously maintained in the host, are known in the art. Such host cells can be used to produce desired proteins.

[0170] DNA sequences can be manipulated with standard procedures such as restriction enzyme digestion, fill-in with DNA polymerase, deletion by exonuclease, extension by terminal deoxynucleotide transferase, ligation of synthetic or cloned DNA sequences, site-directed sequence-alteration via single-stranded bacteriophage intermediate or with the use of specific oligonucleotides in combination with PCR. A nucleic acid encoding a CEB1 can be cloned or amplified by in vitro methods, such as the polymerase chain reaction (PCR), the ligase chain reaction (LCR), the transcription-based amplification system (TAS), the self-sustained sequence replication system (3SR) and the Qβ replicase amplification system (QB). For example, a polynucleotide encoding the protein can be isolated by polymerase chain reaction of cDNA using primers based on the DNA sequence of the molecule. A wide variety of cloning and in vitro amplification methodologies are well known to persons skilled in the art. PCR methods are described in, for example, U.S. Pat. No. 4,683,195; Mullis et al., Cold Spring Harbor Symp. Quant. Biol. 51:263, 1987; and Erlich, ed., PCR Technology, (Stockton Press, N Y, 1989). Polynucleotides also can be isolated by screening genomic or cDNA libraries with probes selected from the sequences of the desired polynucleotide under stringent hybridization conditions.

[0171] Disclosed nucleic acids, such as cDNA sequences encoding proteins associated with CAM regulation, can be operatively linked to expression control sequences. An expression control sequence operatively linked to a coding sequence is ligated such that expression of the coding sequence is achieved under conditions compatible with the expression control sequences. The expression control sequences include, but are not limited to appropriate promoters, enhancers, transcription terminators, a start codon (for instance, ATG) in front of a protein-encoding gene, splicing signal for introns, maintenance of the correct reading frame of that gene to permit proper translation of mRNA, and stop codons.

[0172] Transformation of a host cell with recombinant DNA may be carried out by conventional techniques as are well known to those skilled in the art. Where the host is prokaryotic, such as E. coli, competent cells, which are capable of DNA uptake can be prepared from cells harvested after exponential growth phase and subsequently treated by the CaCl₂ method using procedures well known in the art. Alternatively, MgCl₂, or RbCl can be used. Transformation can also be performed after forming a protoplast of the host cell if desired, or by electroporation.

[0173] When the host is a eukaryote, such methods of transfection of DNA as calcium phosphate coprecipitates, conventional mechanical procedures such as microinjection, electroporation, insertion of a plasmid encased in liposomes, or virus vectors may be used. Eukaryotic cells can also be cotransformed with a second foreign DNA molecule encoding a selectable phenotype, such as the herpes simplex thymidine kinase gene. Another method is to use a eukaryotic viral vector, such as simian virus 40 (SV40) or bovine papilloma virus, to transiently infect or transform eukaryotic cells and express the protein (see for example, Eukaryotic Viral Vectors, Cold Spring Harbor Laboratory, Gluzman ed.,).

[0174] In some embodiments, inserting one or more disclosed nucleic acid sequences into the genome of a cell, such as a plant cell includes using a genome editing system, such as a CRISPR-Cas system, a TALEN system, a ZFN system, a meganuclease, and the like.

[0175] As disclosed herein, mutations in cells, such as the insertion of CEB1 nucleic acids, can be made by way of the CRISPR-Cas system or a Cas9-expressing eukaryotic cell or a Cas-9 expressing eukaryote. The Cas9-expressing eukaryotic cell or eukaryote, can have guide RNA delivered or administered thereto, whereby the RNA targets a loci and induces a desired mutation for use in or as to the invention. With respect to general information on CRISPR-Cas Systems, components thereof, and delivery of such components, including methods, materials, delivery vehicles, vectors, particles, and making and using thereof, including as to amounts and formulations, as well as Cas9-expressing eukaryotic cells, Cas-9 expressing eukaryotes, such as a mouse, reference is made to: U.S. Pat. Nos. 8,697,359, 8,771,945, 8,795,965, 8,865,406, 8,871,445, 8,889,356, 8,889,418, 8,895,308, 8,932,814, 8,945,839, 8,906,616; US Patent Publications US 2014-0310830 (U.S. application Ser. No. 14/105,031), US 2014-0287938 A1 (U.S. application Ser. No. 14/213,991), US 2014-0273234 A1 (U.S. application Ser. No. 14/293,674), US2014-0273232 A1 (U.S. application Ser. No. 14/290,575), US 2014-0273231 (U.S. application Ser. No. 14/259,420), US 2014-0256046 A1 (U.S. application Ser. No. 14/226,274), US 2014-0248702 A1 (U.S. application Ser. No. 14/258,458), US 2014-0242700 A1 (U.S. application Ser. No. 14/222,930), US 2014-0242699 A1 (U.S. application Ser. No. 14/183,512), US 2014-0242664 A1 (U.S. application Ser. No. 14/104,990), US 2014-0234972 A1 (U.S. application Ser. No. 14/183,471), US 2014-0227787 A1 (U.S. application Ser. No. 14/256,912), US 2014-0189896 A1 (U.S. application Ser. No. 14/105,035), US 2014-0186958 (U.S. application Ser. No. 14/105,017), US 2014-0186919 A1 (U.S. application Ser. No. 14/104,977), US 2014-0186843 A1 (U.S. application Ser. No. 14/104,900), US 2014-0179770 A1 (U.S. application Ser. No. 14/104,837) and US 2014-0179006 A1 (U.S. application Ser. No. 14/183,486), US 2014-0170753 (U.S. application Ser. No. 14/183,429); European Patents/Patent Applications: EP 2 771 468 (EP13818570.7), EP 2 764 103 (EP13824232.6), and EP 2 784 162 (EP14170383.5); and PCT Patent Publications WO 2014/093661 (PCT/US2013/074743), WO 2014/093694 (PCT/US2013/074790), WO 2014/093595 (PCT/US2013/074611), WO 2014/093718 (PCT/US2013/074825), WO 2014/093709 (PCT/US2013/074812), WO 2014/093622 (PCT/US2013/074667), WO 2014/093635 (PCT/US2013/074691), WO 2014/093655 (PCT/US2013/074736), WO 2014/093712 (PCT/US2013/074819), WO2014/093701 (PCT/US2013/074800), WO2014/018423 (PCT/US2013/051418), WO 2014/204723 (PCT/US2014/041790), WO 2014/204724 (PCT/US2014/041800), WO 2014/204725 (PCT/US2014/041803), WO 2014/204726 (PCT/US2014/041804), WO 2014/204727 (PCT/US2014/041806), WO 2014/204728 (PCT/US2014/041808), WO 2014/204729 (PCT/US2014/041809), and vMultiplex genome engineering using CRISPR/Cas systems. Cong, L., Ran, F. A., Cox, D., Lin, S., Barretto, R., Habib, N., Hsu, P. D., Wu, X., Jiang, W., Marraffini, L. A., & Zhang, F. Science February 15; 339(6121):819-23 (2013); RNA-guided editing of bacterial genomes using CRISPR-Cas systems. Jiang W., Bikard D., Cox D., Zhang F, Marraffini L A. Nat Biotechnol March; 31(3):233-9 (2013); One-Step Generation of Mice Carrying Mutations in Multiple Genes by CRISPR/Cas-Mediated Genome Engineering. Wang H., Yang H., Shivalila C S., Dawlaty M M., Cheng A W., Zhang F., Jaenisch R. Cell May 9; 153(4):910-8 (2013); Optical control of mammalian endogenous transcription and epigenetic states. Konermann S, Brigham M D, Trevino A E, Hsu P D, Heidenreich M, Cong L, Platt R J, Scott D A, Church G M, Zhang F. Nature. 2013 Aug. 22; 500(7463):472-6. doi: 10.1038/Nature12466. Epub 2013 Aug. 23; Double Nicking by RNA-Guided CRISPR Cas9 for Enhanced Genome Editing Specificity. Ran, F A., Hsu, PD., Lin, C Y., Gootenberg, J S., Konermann, S., Trevino, A E., Scott, D A., Inoue, A., Matoba, S., Zhang, Y., & Zhang, F. Cell August 28. pii: S0092-8674(13)01015-5. (2013); DNA targeting specificity of RNA-guided Cas9 nucleases. Hsu, P., Scott, D., Weinstein, J., Ran, F A., Konermann, S., Agarwala, V., Li, Y., Fine, E., Wu, X., Shalem, O., Cradick, T J., Marraffini, L A., Bao, G., & Zhang, F. Nat Biotechnol doi:10.1038/nbt.2647 (2013); Genome engineering using the CRISPR-Cas9 system. Ran, F A., Hsu, P D., Wright, J., Agarwala, V., Scott, D A., Zhang, F. Nature Protocols November; 8(11):2281-308. (2013); Genome-Scale CRISPR-Cas9 Knockout Screening in Human Cells. Shalem, O., Sanjana, N E., Hartenian, E., Shi, X., Scott, D A., Mikkelson, T., Heckl, D., Ebert, B L., Root, D E., Doench, J G., Zhang, F. Science December 12. (2013). [Epub ahead of print]; Crystal structure of cas9 in complex with guide RNA and target DNA. Nishimasu, H., Ran, F A., Hsu, P D., Konermann, S., Shehata, S I., Dohmae, N., Ishitani, R., Zhang, F., Nureki, O. Cell February 27. (2014). 156(5):935-49; Genome-wide binding of the CRISPR endonuclease Cas9 in mammalian cells. Wu X., Scott D A., Kriz A J., Chiu A C., Hsu P D., Dadon D B., Cheng A W., Trevino A E., Konermann S, Chen S., Jaenisch R., Zhang F., Sharp P A. Nat Biotechnol. (2014) Apr. 20. doi: 10.1038/nbt.2889; CRISPR-Cas9 Knockin Mice for Genome Editing and Cancer Modeling, Platt et al., Cell 159(2): 440-455 (2014) DOI: 10.1016/j.cell.2014.09.014; Development and Applications of CRISPR-Cas9 for Genome Engineering, Hsu et al, Cell 157, 1262-1278 (Jun. 5, 2014) (Hsu 2014); Genetic screens in human cells using the CRISPR/Cas9 system, Wang et al., Science. 2014 Jan. 3; 343(6166): 80-84. doi:10.1126/science.1246981; Rational design of highly active sgRNAs for CRISPR-Cas9-mediated gene inactivation, Doench et al., Nature Biotechnology 32(12):1262-7 (2014) published online 3 Sep. 2014; doi:10.1038/nbt.3026, each of which is incorporated herein by reference.

[0176] As disclosed herein, mutations in cells, such as the insertion of disclosed nucleic acids, can be made by way of the transcription activator-like effector nucleases (TALENs) system. Transcription activator-like effectors (TALEs) can be engineered to bind practically any desired DNA sequence. Exemplary methods of genome editing using the TALEN system can be found for example in Cermak T. Doyle E L. Christian M. Wang L. Zhang Y. Schmidt C, et al. Efficient design and assembly of custom TALEN and other TAL effector-based constructs for DNA targeting. Nucleic Acids Res. 2011; 39:e82; Zhang F. Cong L. Lodato S. Kosuri S. Church G M. Arlotta P Efficient construction of sequence-specific TAL effectors for modulating mammalian transcription. Nat Biotechnol. 2011; 29:149-153 and U.S. Pat. Nos. 8,450,471, 8,440,431 and 8,440,432, all of which are specifically incorporated by reference.

[0177] As disclosed herein, mutations in cells, such as the insertion of disclosed nucleic acids can be made by way of the zinc-finger nucleases (ZFNs) system. The ZFN system uses artificial restriction enzymes generated by fusing a zinc finger DNA-binding domain to a DNA-cleavage domain that can be engineered to target desired DNA sequences. Exemplary methods of genome editing using ZFNs can be found for example in U.S. Pat. Nos. 6,534,261, 6,607,882, 6,746,838, 6,794,136, 6,824,978, 6,866,997, 6,933,113, 6,979,539, 7,013,219, 7,030,215, 7,220,719, 7,241,573, 7,241,574, 7,585,849, 7,595,376, 6,903,185, and 6,479,626, all of which are specifically incorporated by reference.

[0178] As disclosed herein, mutations in cells, such as the insertion of a disclosed nucleic acid sequence, can be made by way of meganucleases, which are endodeoxyribonucleases characterized by a large recognition site (double-stranded DNA sequences of 12 to 40 base pairs). Exemplary method for using megonucleases can be found in U.S. Pat. Nos. 8,163,514; 8,133,697; 8,021,867; 8,119,361; 8,119,381; 8,124,369; and 8,129,134, which are specifically incorporated by reference.

[0179] The expression and purification of any of the disclosed proteins, by standard laboratory techniques, is now enabled. Fragments amplified as described herein can be cloned into standard cloning vectors and expressed in commonly used expression systems consisting of a cloning vector and a cell system in which the vector is replicated and expressed. Purified proteins may be used for functional analyses. Partial or full-length cDNA sequences, which encode for the protein, may be ligated into bacterial expression vectors. Methods for expressing large amounts of protein from a cloned gene introduced into E. coli may be utilized for the purification, localization and functional analysis of proteins.

[0180] Intact native protein may also be produced in E. coli in large amounts for functional studies. Standard prokaryotic cloning vectors may also be used, for example, pBR322, pUC18, or pUC19 as described in Sambrook et al. (Molecular Cloning: A Laboratory Manual, 2nd ed., vol. 1-3, Cold Spring Harbor, N.Y. 1989). Nucleic acids of CEB1 nucleic acids, such as cDNA sequences, may be cloned into such vectors, which may then be transformed into bacteria such as E. coli, which may then be cultured so as to express the protein of interest. Other prokaryotic expression systems include, for instance, the arabinose-induced pBAD expression system that allows tightly controlled regulation of expression, the IPTG-induced pRSET system that facilitates rapid purification of recombinant proteins and the IPTG-induced pSE402 system that has been constructed for optimal translation of eukaryotic genes. These three systems are available commercially from INVITROGEN™ and, when used according to the manufacturer's instructions, allow routine expression and purification of proteins.

[0181] Methods and plasmid vectors for producing fusion proteins and intact native proteins in bacteria are described in Sambrook et al. (Molecular Cloning: A Laboratory Manual, Cold Spring Harbor, N.Y., 1989, Chapter 17). Such fusion proteins may be made in large amounts and are easy to purify. Proteins can be produced in bacteria by placing a strong, regulated promoter and an efficient ribosome binding site upstream of the cloned gene. If low levels of protein are produced, additional steps may be taken to increase protein production; if high levels of protein are produced, purification is relatively easy. Suitable methods are presented in Sambrook et al. (Molecular Cloning: A Laboratory Manual, Cold Spring Harbor, N.Y., 1989) and are well known in the art. Often, proteins expressed at high levels are found in insoluble inclusion bodies. Methods for extracting proteins from these aggregates are described by Sambrook et al. (Molecular Cloning: A Laboratory Manual, Cold Spring Harbor, N.Y., 1989, Chapter 17).

[0182] A number of viral vectors have been constructed, that can be used to express the disclosed sequences, including polyoma, i.e., SV40 (Madzak et al., 1992, J. Gen. Virol., 73:15331536), adenovirus (Berkner, 1992, Cur. Top. Microbiol. Immunol., 158:39-6; Berliner et al., 1988, Bio Techniques, 6:616-629; Gorziglia et al., 1992, J. Virol., 66:4407-4412; Quantin et al., 1992, Proc. Natl. Acad. Sci. USA, 89:2581-2584; Rosenfeld et al., 1992, Cell, 68:143-155; Wilkinson et al., 1992, Nucl. Acids Res., 20:2233-2239; Stratford-Perricaudet et al., 1990, Hum. Gene Ther., 1:241-256), vaccinia virus (Mackett et al., 1992, Biotechnology, 24:495-499), adeno-associated virus (Muzyczka, 1992, Curr. Top. Microbiol. Immunol., 158:91-123; On et al., 1990, Gene, 89:279-282), herpes viruses including HSV and EBV (Margolskee, 1992, Curr. Top. Microbiol. Immunol., 158:67-90; Johnson et al., 1992, J. Virol., 66:29522965; Fink et al., 1992, Hum. Gene Ther. 3:11-19; Breakfield et al., 1987, Mol. Neurobiol., 1:337-371; Fresse et al., 1990, Biochem. Pharmacol., 40:2189-2199), Sindbis viruses (H. Herweijer et al., 1995, Human Gene Therapy 6:1161-1167; U.S. Pat. Nos. 5,091,309 and 5,2217,879), alphaviruses (S. Schlesinger, 1993, Trends Biotechnol. 11:18-22; I. Frolov et al., 1996, Proc. Natl. Acad. Sci. USA 93:11371-11377) and retroviruses of avian (Brandyopadhyay et al., 1984, Mol. Cell. Biol., 4:749-754; Petropouplos et al., 1992, J. Virol., 66:3391-3397), murine (Miller, 1992, Curr. Top. Microbiol. Immunol., 158:1-24; Miller et al., 1985, Mol. Cell. Biol., 5:431-437; Sorge et al., 1984, Mol. Cell. Biol., 4:1730-1737; Mann et al., 1985, J. Virol., 54:401-407), and human origin (Page et al., 1990, J. Virol., 64:5370-5276; Buchschalcher et al., 1992, J. Virol., 66:2731-2739). Baculovirus (Autographa californica multinuclear polyhedrosis virus; AcMNPV) vectors are also known in the art, and may be obtained from commercial sources (such as PharMingen, San Diego, Calif.; Protein Sciences Corp., Meriden, Conn.; Stratagene, La Jolla, Calif.).

[0183] Various yeast strains and yeast-derived vectors are commonly used for expressing and purifying proteins, for example, Pichia pastoris expression systems are available from INVITROGEN™ (Carlsbad, Calif.). Such systems include suitable Pichia pastoris strains, vectors, reagents, transformants, sequencing primers and media. Non-yeast eukaryotic vectors can also be used for expression, such as mMTPSL 1, 2 and 4 through 48 polypeptides. Examples of such systems are the Baculovirus system, the Ecdysone-inducible mammalian expression system that uses regulatory elements from Drosophila melanogaster to allow control of gene expression, and the Sindbis viral expression system that allows high level expression in a variety of mammalian cell lines. These expression systems are available from INVITROGEN™.

[0184] In addition, some vectors contain selectable markers such as the gpt (Mulligan and Berg, Proc. Natl. Acad. Sci. USA 78:2072-6, 1981) or neo (Southern and Berg, J. Mol. Appl. Genet. 1:327-41, 1982) bacterial genes. These selectable markers permit selection of transfected cells that exhibit stable, long-term expression of the vectors (and therefore the cDNA). The vectors can be maintained in the cells as episomal, freely replicating entities by using regulatory elements of viruses such as papilloma (Sarver et al., Mol. Cell. Biol. 1:486, 1981) or Epstein-Barr (Sugden et al., Mol. Cell. Biol. 5:410, 1985). Alternatively, one can also produce cell lines that have integrated the vector into genomic DNA. Both of these types of cell lines produce the gene product on a continuous basis. One can also produce cell lines that have amplified the number of copies of the vector (and therefore of the cDNA as well) to create cell lines that can produce high levels of the gene product (Alt et al., J. Biol. Chem. 253:1357, 1978).

[0185] The transfer of DNA into eukaryotic cells is now a conventional technique. The vectors are introduced into the recipient cells as pure DNA (transfection) by, for example, precipitation with calcium phosphate (Graham and vander Eb, 1973, Virology 52:466) or strontium phosphate (Brash et al., Mol. Cell. Biol. 7:2013, 1987), electroporation (Neumann et al., EMBO J. 1:841, 1982), lipofection (Felgner et al., Proc. Natl. Acad. Sci. USA 84:7413, 1987), DEAE dextran (McCuthan et al., J. Natl. Cancer Inst. 41:351, 1968), microinjection (Mueller et al., Cell 15:579, 1978), protoplast fusion (Schather, Proc. Natl. Acad. Sci. USA 77:2163-7, 1980), or pellet guns (Klein et al, Nature 327:70, 1987). Alternatively, the cDNA can be introduced by infection with virus vectors. Systems are developed that use, for example, retroviruses (Bernstein et al., Gen. Engrg. 7:235, 1985), adenoviruses (Ahmad et al., J. Virol. 57:267, 1986), or Herpes virus (Spaete et al., Cell 30:295, 1982).

[0186] C. Transgenics

[0187] Also provided are transgenic plants. In one embodiment, a transgenic plant is stably transformed with a disclosed nucleic acid construct, such as a construct comprising one or more disclosed nucleic acid sequences. In some embodiments, the transgenic plant is a dicotyledon. In other embodiments, the transgenic plant is a monocotyledon. Further provided is a seed of a disclosed transgenic plant. In one embodiment, the seed comprises the disclosed nucleic acid construct. Even further provided is a transgenic plant cell or tissue. In one embodiment, a transgenic plant cell or tissue comprises a disclosed nucleic acid or functional fragment thereof. In some embodiments, the plant cell or tissue is derived from a dicotyledon. In other embodiments, the plant cell or tissue is from a monocotyledon.

[0188] Also provided are methods of producing a disclosed transgenic plant, plant cell, seed or tissue. In some embodiments, the method comprises transforming a plant cell or tissue with a disclosed nucleic acid construct.

[0189] Further provided are a plant cell, fruit, leaf, root, shoot, flower, seed, cutting and other reproductive material useful in sexual or asexual propagation, progeny plants inclusive of F1 hybrids, male-sterile plants and all other plants and plant products derivable from the disclosed transgenic plants.

[0190] In some embodiments, an expression cassette including a disclosed a nucleic acid sequence (such as having at least 80% sequence identity to the nucleic acid sequence set forth by one of the disclosed sequences or a degenerate nucleic acid) or functional fragment thereof, operably linked to promoter and optionally other heterologous nucleic acids can be used to transform any plant or part thereof, such as a plant cell, for example as a vector, such as a plasmid. In this manner, genetically modified plants, plant cells, plant tissue, seed, and the like can be obtained. Such methods, include introducing into a plant a nucleic acid sequence (such as having at least 80% sequence identity to the nucleic acid sequence set forth herein or a degenerate nucleic acid) or functional fragment thereof, operably linked to promoter and optionally other heterologous nucleic acids. The plant can be transiently or stably transformed. Tissue succulence can be determined relative to a relevant control plant. The control plant is generally matched for species, variety, age, and the like and is subjected to the same growing conditions, for example temperature, soil, sunlight, pH, water, and the like. The selection of a suitable control plant is routine for those skilled in the art.

[0191] Transformation protocols as well as protocols for introducing nucleotide sequences into plants may vary depending on the type of plant or plant cell, for example, monocot or dicot, targeted for transformation. Suitable methods of introducing nucleotide sequences into plant cells and subsequent insertion into the plant genome include microinjection (Crossway et al., Biotechniques 4:320-334, 1986), electroporation (Riggs et al., Proc. Natl. Acad. Sci. USA 53:5602-5606, 1986), Agrobacterium-mediated transformation (U.S. Pat. No. 5,563,055), direct gene transfer (Paszkowski et al., EMBO J. 3:2717-2722, 1984), and Biolistic® particle acceleration (see, for example, U.S. Pat. No. 4,945,050; Tomes et al. “Direct DNA Transfer into Intact Plant Cells via Microprojectile Bombardment,” in Plant Cell, Tissue, and Organ Culture: Fundamental Methods, ed. Gamborg and Phillips (Springer-Verlag, Berlin), 1995; and McCabe et al., Biotechnology 5:923-926, 1988). Also see Weissinger et al., Ann. Rev. Genet. 22:421-477, 1988; Sanford et al., Paniculate Science and Technology 5:27-37, 1987; Christou et al., Plant Physiol 57:671-674, 1988; McCabe et al., Bio/Technology 5:923-926, 1988; Finer and McMullen, In Vitro Cell Dev. Biol. 27P:175-182, 1991; Singh et al., Theor. Appl Genet. 95:319-324, 1998; Datta et al., Biotechnology 5:736-740, 1990; Klein et al., Proc. Natl. Acad. Sci. USA 55:4305-4309, 1988; Klein et al., Biotechnology 5:559-563, 1988; U.S. Pat. Nos. 5,240,855, 5,322,783 and 5,324,646; Klein et al., Plant Physiol 97:440-444, 1988; Fromm et al. Biotechnology 5:833-839, 1990; Hooykaas-Van Slogteren et al., Nature 377:763-764, 1984; Bytebier et al., Proc. Natl. Acad. Sci. USA 54:5345-5349, 1987; De Wet et al. (1985) in The Experimental Manipulation of Ovule Tissues, ed. Chapman et al. (Longman, N.Y.), pp. 197-209; Kaeppler et al., Plant Cell Reports 9:415-418, 1990; Kaeppler et al., Theor. Appl. Genet. 54:560-566, 1992; D'Halluin et al., Plant Cell 4:1495-1505 1992; Li et al., Plant Cell Reports 72:250-255, 1993; Christou and Ford Annals of Botany 75:407-413, 1995; Osjoda et al., Nature Biotechnology 74:745-750, 1996; and the like. “Introducing” in the context of a plant cell, plant tissue, plant part and/or plant means contacting a nucleic acid molecule with the plant cell, plant tissue, plant part, and/or plant in such a manner that the nucleic acid molecule gains access to the interior of the plant cell or a cell of the plant tissue, plant part or plant. Where more than one nucleic acid molecule is to be introduced, these nucleic acid molecules can be assembled as part of a single polynucleotide or nucleic acid construct, or as separate polynucleotide or nucleic acid constructs, and can be located on the same or different nucleic acid constructs. Accordingly, these polynucleotides can be introduced into plant cells in a single transformation event, in separate transformation events, or, for example as part of a breeding protocol.

[0192] The cells that have been transformed can be grown into plants in accordance with conventional ways. See, for example, McCormick et al. Plant Cell Reports 5:81-84, 1986. These plants may then be grown, and either pollinated with the same transformed strain or different strains, and the resulting hybrid having expression of the desired phenotypic characteristic identified. Two or more generations may be grown to ensure that expression of the desired phenotypic characteristic is stably maintained and inherited and then seeds harvested to ensure expression of the desired phenotypic characteristic has been achieved.

[0193] In some embodiments, a nucleic acid sequences disclosed herein, such as a nucleic acid sequence having at least 80% sequence identity to the nucleic acid sequence set forth by one of SEQ ID NOs: 1-9 or a degenerate nucleic acid or active variant and fragments thereof are used for transformation of any plant species, including, but not limited to, monocots and dicots. Examples of plant species of interest include, but are not limited to, corn (Zea mays), Brassica sp. (e.g., B. napus, B. rapa, B. juncea), particularly those Brassica species useful as sources of seed oil, alfalfa (Medicago sativa), rice (Oryza sativa), rye (Secale cereale), sorghum (Sorghum bicolor, Sorghum vulgare), millet (e.g., pearl millet (Pennisetum glaucum), proso millet (Panicum miliaceum), foxtail millet (Setaria italica), finger millet (Eleusine coracana), sunflower (Helianthus annuus), safflower (Carthamus tinctorius), wheat (Triticum aestivum), soybean (Glycine max), tobacco (Nicotiana tabacum), potato (Solanum tuberosum), peanuts (Arachis hypogaea), cotton (Gossypium barbadense, Gossypium hirsutum), sweet potato (Ipomoea batatus), cassava (Manihot esculenta), coffee (Coffea spp.), coconut (Cocos nucifera), pineapple (Ananas comosus), citrus trees (Citrus spp.), cocoa (Theobroma cacao), tea (Camellia sinensis), banana (Musa spp.), avocado (Persea americana), fig (Ficus casica), guava (Psidium guajava), mango (Mangifera indica), olive (Olea europaea), papaya (Carica papaya), cashew (Anacardium occidentale), macadamia (Macadamia integrifolia), almond (Prunus amygdalus), sugar beets (Beta vulgaris), sugarcane (Saccharum spp.), oats, barley, vegetables, ornamentals, and conifers. Vegetables include tomatoes (Lycopersicon esculentum), lettuce (e.g., Lactuca sativa), green beans (Phaseolus vulgaris), lima beans (Phaseolus limensis), peas (Lathyrus spp.), and members of the genus Cucumis such as cucumber (C. sativus), cantaloupe (C. cantalupensis), and musk melon (C. melo). Ornamentals include azalea (Rhododendron spp.), hydrangea (Macrophylla hydrangea), hibiscus (Hibiscus rosasanensis), roses (Rosa spp.), tulips (Tulipa spp.), daffodils (Narcissus spp.), petunias (Petunia hybrida), carnation (Dianthus caryophyllus), poinsettia (Euphorbia pulcherrima), and chrysanthemum. Conifers that may be employed in practicing the present invention include, for example, pines such as loblolly pine (Pinus taeda), slash pine (Pinus elliotii), ponderosa pine (Pinus ponderosa), lodgepole pine (Pinus contorta), and Monterey pine (Pinus radiata); Douglas-fir (Pseudotsuga menziesii); Western hemlock (Tsuga canadensis); Sitka spruce (Picea glauca); redwood (Sequoia sempervirens); true firs such as silver fir (Abies amabilis) and balsam fir (Abies balsamea); and cedars such as Western red cedar (Thuja plicata) and Alaska yellow-cedar (Chamaecyparis nootkatensis), and various Poplar and Eucalyptus species.

[0194] In specific embodiments, plants of the present disclosure are crop plants (for example, corn, alfalfa, sunflower, Brassica, soybean, cotton, safflower, peanut, sorghum, wheat, millet, tobacco, etc.). In other embodiments, corn and soybean plants are optimal, and in yet other embodiments soybean plants are optimal. Other plants of interest include grain plants that provide seeds of interest, oilseed plants, and leguminous plants. Seeds of interest include grain seeds, such as corn, wheat, barley, rice, sorghum, rye, etc. Oil-seed plants include cotton, soybean, safflower, sunflower, Brassica, maize, alfalfa, palm, coconut, etc. Leguminous plants include beans and peas. Beans include guar, locust bean, fenugreek, soybean, garden beans, cowpea, mungbean, lima bean, fava bean, lentils, chickpea, etc.

[0195] In some embodiments, the disclosed polynucleotides are engineered into a molecular stack. Thus, the various plants, plant cells and seeds disclosed herein can further comprise one or more traits of interest, and in more specific embodiments, the plant, plant part or plant cell is stacked with any combination of polynucleotide sequences of interest in order to create plants with a desired combination of traits. As used herein, the term “stacked” includes having the multiple traits present in the same plant. These stacked combinations can be created by any method including, but not limited to, breeding plants by any conventional methodology, or genetic transformation. If the sequences are stacked by genetically transforming the plants, the polynucleotide sequences of interest can be combined at any time and in any order. The traits can be introduced simultaneously in a co-transformation protocol with the polynucleotides of interest provided by any combination of transformation cassettes. For example, if two sequences will be introduced, the two sequences can be contained in separate transformation cassettes (trans) or contained on the same transformation cassette (cis). Expression of the sequences can be driven by the same promoter or by different promoters. In certain cases, it may be desirable to introduce a transformation cassette that will suppress the expression of the polynucleotide of interest. This may be combined with any combination of other suppression cassettes or overexpression cassettes to generate the desired combination of traits in the plant. It is further recognized that polynucleotide sequences can be stacked at a desired genomic location using a site-specific recombination system. See, for example, WO99/25821, WO99/25854, WO99/25840, WO99/25855, and WO99/25853.

[0196] The transformed plants may be analyzed for the presence of the gene(s) of interest and the expression level. Numerous methods are available to those of ordinary skill in the art for the analysis of transformed plants. For example, methods for plant analysis include Southern and northern blot analysis, PCR-based (or other nucleic acid amplification-based) approaches, biochemical analyses, phenotypic screening methods, field evaluations, and immunodiagnostic assays (e.g., for the detection, localization, and/or quantification of proteins).

[0197] The following examples are provided to better describe the present disclosure and to guide those of ordinary skill in the art in the practice of the present disclosure.

### EXAMPLES

### Example 1

### Material and Methods

[0198] Expression analysis of core CAM genes in ice plant

[0199] Seedlings of the wild-type ice plant (Mesembryanthemum crystallinum L.) were grown in a growth chamber under 12 h/12 h (light, 350 μmol m² s⁻¹/dark) cycles at 26° C./18° C. (day/night). Four-week-old plants were subjected to well-watered and water-deficit stressed conditions for seven days and leaves were collected at each time point 0 (dawn), 4, 8, 12 (dusk), 16, 20, and 24 h (dawn). Total RNA was isolated using the RNeasy Midi Kit with a modified PEG-RNA extraction method that utilizes high-molecular weight polyethylene glycol (Gehrig et al, 2000, Plant Molecular Biology Reporter 18: 369-376). The cDNA library was sequenced on a single read flow cell using the illumina HiSeq2000 system. RNA-seq data were assembled and then the relative mRNA expression values were normalized by TMM (trimmed mean of M-values). The averaged FPKM (fragments per kb of exon per million fragments mapped) values of three replicates were then calculated (Robinson and Oshlack, 2010, Genome Biology 11 (R25); Trapnell et al., 2010, Nature Biotechnology 28: 511-515). Examination of the expression values allowed for the identification of specific isogenes encoding key C₄ enzymes that are involved in the crassulacean acid metabolism (CAM) pathway.

### CAM Gene Cloning

[0200] To isolate nine selected CAM genes in ice plant, the full-length coding sequences of McBca2 (encoding beta-carbonic anhydrase), McPpc1 (encoding phosphoenolpyruvate carboxylase), McPpck (encoding phosphoenolpyruvate carboxylase kinase), McMdh2 (NAD-malate dehydrogenase), McNADP-ME3 (NADP-malic enzyme), McPpdk1 (encoding pyruvate orthophosphate dikinase), McPpdk-RP (encoding pyruvate orthophosphate dikinase regulatory protein), McALMT4 (vacuolar aluminum malate transporter), and MctDT (tonoplast-dicarboxylate transporter), were retrieved from transcriptome assembly as described above. First-strand complementary DNA (cDNA) synthesis from 500 ng of total RNA at indicate time points (unstressed condition; 24 h, drought stress condition; 04, 08, 12, and 24 h) was performed using a SuperScript® III kit (Invitrogen, Carlsbad, Calif., USA) according to the manufacturer's protocol. The nine CAM genes were amplified with appropriate primer pairs (Tables 1 and 2) using a high-fidelity pfu Turbo DNA polymerase (Stratagene, La Jolla, Calif., USA) from the cDNA mixture. Purified PCR products then were directly introduced into the Zero Blunt® TOPO vector (Invitrogen, Carlsbad, Calif., USA). Each of the cloned coding sequences was verified by DNA sequencing (Nevada Genomics Center, Reno, Nev., USA) and subcloned into pENTR™ D-TOPO vector (Invitrogen, Carlsbad, Calif., USA) containing attachment L1 and L2 sites for gateway LR reaction. SEQ ID Nos: 70-78 provide sequences for Zero Blunt TOPO vectors including DNA sequences of CAM-gene coding regions.

### Promoter Mining in Arabidopsis

[0201] In order to retrieve circadian clock-controlled genes in Arabidopsis, high-throughput experimental data of mRNA expression profiling were collected from the public repository of Gene Expression Omnibus (GEO). Three microarray datasets of Hsu and Harmer (2012, PLoS ONE 7: e49853), Covington and Harmer (2007, PLoS Biology 5: e222), and Edwards et al. (2006, Plant Cell 18: 639-650) were chosen for the analysis of circadian clock-controlled genes. Then, quantile normalization was carried out using commercial software, CLC Main Workbench. After cross-platform mapping, a total of 20,221 genes were retrieved and matched to the TAIR 10 database for annotation (see World Wide Web address arabidopsis.org/). Next, circadian clock-controlled genes were identified and analyzed using the JTK-Cycle algorithm (Hughes et al., 2010, Journal of Biological Rhythms 25: 372-380) for robust circadian rhythms (p<0.05). A total of 982 genes were retrieved that were common among three datasets. Then, the tissue-specific expression patterns and mesophyll versus guard cell expression patterns of 982 genes were verified manually by comparison to the on-line Arabidopsis eFP Browser (Winter et al., 2007, PLoS ONE 2: e718). In the final analysis, 14 genes with circadian rhythmic and mesophyll-specific expression patterns were used to provide optimal expression of the core ice plant CAM genes in Arabidopsis.

### Plasmid Construction and Cloning for Promoter Analysis

[0202] To identify tissue-specific- and/or circadian rhythmic expression patterns of upstream regions of the selected 14 genes in Arabidopsis, a GUS/LUC dual vector was constructed by fusing the full coding sequence (CDS) of firefly luciferase (LUC) to bacterial β-glucuronidase (GUS). An ASGGGA flexible linker was incorporated between the GUS and LUC to minimize the loss of enzymatic activities and to limit conformation interference in the GUS/LUC fusion protein. The synthesized HindIII-attR1-chloramphenicol acetyl transferase (CAT)-ccdB-GUS-ASGGGA-LUC-attR2-SacI (5,255 bp) genes were cloned into pGWB401 (Nakagawa et al., 2007, Bioscience Biotechnology, and Biochemistry 71: 2095-2100), then named the GUS/LUC dual vector. The DNA sequence of the GUS/LUC dual vector is presented as SEQ ID NO: 79.

[0203] Putative promoter regions (up to 1.5 kb of sequence upstream of the translation start site) of selected 14 genes, AT3G59350pro1 (5′-upstream region; −1114 to +245, protein kinase protein), AT4G32340pro2 (−878 to +86, tetratricopeptide repeat-like protein), AT5G23240pro3 (−1310 to +190, DNAJ heat shock N-terminal domain-containing protein), AT5G44050pro4 (−903 to −1, MATE efflux family protein), AT4G04330pro5 (−1466 to +34, chaperonin-like RbcX protein), AT4G23290pro6 (−1105 to +16, cysteine-rich RLK 21), AT1G07180pro7 (−1406 to +94, alternative NADPH dehydrogenase 1), AT1G65490pro8 (−1479 to +21, unknown protein), AT1G21670pro9 (−1332 to +11, unknown protein), AT2G17450pro10 (−1397 to +103, RING-H2 finger A3A), AT4G01130pro11 (−1349 to +35, GDSL-like lipase/acylhydrolase protein), AT5G19240pro12 (−1420 to +80, glycoprotein membrane precursor GPI-anchored), AT5G58120pro13 (−852 to −1, disease resistance protein), and AT3G47340pro14 (−1300 to +200, glutamine-dependent asparagine synthase 1) with attL1 and attL2 were synthesized by DNA 2.0 and cloned into the GUS/LUC dual vector using LR clonase (Invitrogen, Carlsbad, Calif., USA).

### Gene Synthesis of Terminator and Protein Tag

[0204] Putative terminator regions (up to 873 bp of downstream sequences from the stop codon) of selected 14 genes, AT3G59350ter1 (3′-downstream region; +2199 to +2629), AT4G32340ter2 (+1566 to +2438), AT5G23240ter3 (+1869 to +2113), AT5G44050ter4 (+3727 to +4226), AT4G04330ter5 (+1899 to +2072), AT4G23290ter6 (+2918 to +3417), AT1G07180ter7 (+2455 to +2954), AT1G65490ter8 (+406 to +905), AT1G21670ter9 (+2124 to +2607), AT2G17450ter10 (+662 to +1161), AT4G01130ter11 (+2176 to +2675), AT5G19240ter12 (+854 to +1353), AT5G58120ter13 (+3437 to +3698), and AT3G47340ter14 (+3109 to +3608), were synthesized with attL3 and attL2. For evaluation of the protein expression levels of the CAM genes in transgenic plants, the 3×FLAG, V5, 3×HA, 4×cMyc, AU1, AcV5, Strep-tagII, 6×His, and T7 protein tag were codon optimized based upon the Codon Usage Database (see website kaxusa.or.jp/codon/) in Arabidopsis and synthesized with attR4 and R3 recombination sites. All synthesized DNA sequences of putative the promoters, terminators, and protein tags are presented below (bold letters indicate attachment sites for Multisite Gateway cloning; italic letters are additional sequences for adjusting protein frame; promoter, terminator, or protein tag are in upper case no italic or bold; and lower case letters in protein tag sequences, are codon optimized sequences):

AT3G59350pro1 (5′- upstream region; −1114 to +245; SEQ ID NO: 80)
CAAATAATGATTTTATTTTGACTGATAGTGACCTGTTCGTTGCAACAAA
TTGATAAGCAATGCTTTTTTATAATGCCAACTTTGTACAAAAAAGCAGG
CTGATTTCTATCAATGAAAGTAGACGTTAAAAAAAAAAAAAGATATCACA
GTACGTGGAAACACGTGACACATATTTTAAAGGGAAAATATAAACGTGAA
ATGCGTGGAAACTGGCAAGTAGACTATTAATATTTATGGGCCTATAGTGGT
TATATCAGGCTTTATTGGGCTCTCTATACGAATTAAAAGCCTCAAACAAATA
ATAGAACTTGAATTGTAGGCTTTTGTACCCACCAAACTGGCCGCCGGTGAC
CCCCTCTCACGCCGTATCTCTTTTTCTTTTTCTTGTTTTTTTTTTTTTTTTTTTT
TTTTTTTTTTTTTGTGTGCGCGTATTTGTTTCACCATCAAAAAATTAATTTTG
TTTTAAGTGTTTTATTTTCCTTCGTTTTGTTTAAAGTGTTTAAAATCGTTAGT
TCAATGTTGAAAAATATACAATAATAGAAACAATTGTGACTTTTGTAATTTG
AATGAACAAAACATATAACAATAAGTCCTATAATATAAACATTTTAATTTA
CATTTTCAACTTTTTCTCATTTTAAATTTTTATTCAGTTGAAGGCTTGAAGCG
TTGGACTACTTTAGAGAAACTTTACAAGAACGTTCTTAACATCTTTTTTTCTT
TCCTTTTTGAATATCAAAATCAGTTAAAAACACTTTTGATCTCACAGAAACT
GATACAAAGCCGACGGAACCGACCAGATTAGGTCAAAAACGTAAAAGACG
CGCAAAAAGAAAAGAAAATAACTCATAATAGAATGTTTTAGTCAGAAGAA
AAAAGTACAATATGACCAACGTAAACAAAAAAGATGTTGACGACATAAAG
AAAAGAGCTACAGAGACAAAGGCATTAAAATATCTTTTGTCGAAATCTGAA
GATATTTCCTTAAGCGCGTTTGCTTCTCTGTCTCCTCCATTCCATTCTATATC
ATCTCTGTCTTTGCTCTAAGCTTTCCTGTCAAAACAAAAATTCAATTCCCCA
CGTCTGTCTTATCCACAATAAAACCGACCTTAGCTTAGCTTAGACTCATTAC
TCATTTCACAAAAACAGAGAGAGAAATAGAGAGACATACTTTACAGGTAAT
AATTATCTTGTTTAATTGTATTATATATCTCTAACTAAATTTGGGATAAAAA
TTGTCTATTCTTGATCATTCCTCTCTGTATCTCTCTGCTTTTGACACCTTCTCT
TAGCTGTTTTTTCATCTTTTATCTCTGTTTTTAAAATCTTTTGGCTCTTTCGAA
GGGTTTCGAGTCCTTTTGAGTTCTTTGGGCTTCCTCCCAAATTTCTCCACGA
GCTCGACCCCTTTCGTATCTTCCTTCTCATTTTTTTGCCAAATTTATTCGATC
CGTCTTTCACTACCCAGCTTTCTTGTACAAAGTTGGCATTATAAGAAAGC
ATTGCTTATCAATTTGTTGCAACGAACAGGTCACTATCAGTCAAAATAA
AATCATTATTTG
AT4G32340pro2 (−878 to +86; SEQ ID NO: 81)
CAAATAATGATTTTATTTTGACTGATAGTGACCTGTTCGTTGCAACAAA
TTGATAAGCAATGCTTTTTTATAATGCCAACTTTGTACAAAAAAGCAGG
CTTTCATTAAAAAAATATTTTTATACTATATAAAGAAAGCAGAAAAACACA
GTTTAATTGCTTTTTTCAAGTTCCATATCATTTTTAGTGTATATTTATTGCCC
TTTTATAAATGAAATTAGGAAATTTGGATCACCTTATGGTCAATTTCTTTAT
TTTTTTAGTTATACCACATTTATACTACTGATGATGAAAATCGATTTTTTGTA
TCGTGAACACTTATTAACTGGTTTTATCTTGAATAATAAAACTTCCATAGTT
ATTCCGTTATTGTTAGGTCATTGTAAAAAATCATCAGCAATTAGTCATTAAA
TATACTATCAAAGCTTGTCAGTCATTTCTCATCAATTCTAGCAAAATTATTC
GATATATCCAAATCCAAATGTCTTGGTTTGGTCATGACTCATGACCGTGGAA
ATAAGTTCAAGAATGCAAAAAGTAACTTATTTGTGGGACAGAATCAAATTC
TTTGATCCAGTTACTTACGTCTTTCCGTAGCCAATCAAATTGAAATATTTTCT
TTAGGGGTATTCGATTATGGTGGTCCTGAAGCCTATAACAATTGTTTTCCGA
TAAGATTTGATATATATAAATAAGGGAACAATCCCCAAAAATGATATCTAG
TTAAGATAGTCGTAGAATTTACAGAAAAGGCTACTTATGTTTTTGGCCTGAT
AATGCAAATACTTTCAAAATGTTTTATTTGCTAACTAGCTTTTAGTTTCGTTC
TCGTATCTAAAGTTAGAGATTAACTTACTATTCTTGTATTACGATAACGTTT
TGAATGAACATGTAATGATGCAAGGGTGTAACCAAAAATGATAAAACTTTG
GGGTCAATTTGATAATATTGACTAATAGTGTGGGGCTTGACAAGAACCGGA
AACTCCATGATATTTTTGCAGTCTAAATATCTTTTCATCTCTCTTCTCTTCCT
CCACTGAAATATTCCCCACAAGAACTAACAACCCAGCTTTCTTGTACAAA
GTTGGCATTATAAGAAAGCATTGCTTATCAATTTGTTGCAACGAACAGG
TCACTATCAGTCAAAATAAAATCATTATTTG
AT5G23240pro3 (−1310 to +190; SEQ ID NO: 82)
CAAATAATGATTTTATTTTGACTGATAGTGACCTGTTCGTTGCAACAAA
TTGATAAGCAATGCTTTTTTATAATGCCAACTTTGTACAAAAAAGCAGG
CTCTGAAATTTAGTAGAGAAAAATATATGTTTTTTTCTACATACAGAATAGT
TTGAATTTTTAAAATCGGATTTGAATTTTAAAAATAGAAATAGTGTTTGTAA
GTAAAAAATATATTGTACTATTTAAGATGTATAGAAATAAAATATTGTTCTA
TACTATTTTCATAACTGATTTGTAAATCAATTTTAATTTTAGTATAGAGCAA
AATGTTTTAAATATAAAGTAATAGTGTTGGTAGTGGTGATGAGATAGTAGT
TTATGTTACGTTAATATAGCATTATAATCAATTAAATGTTTTTGTTGGAAGG
ATACTAAACCCTAAGTGGATAATATATTGGGAACCCAAAGATTTCAATCTA
AAATTTAATATTCTTTAACCATAGAAAAATAGAATAATATATGTTTGTCATC
ACTACCAACATAACGAGTAGCACAGCACAAGATAGTCTCTTGGTAGAGGA
AAGAAGTGGTAGTAGAGAACACCGGGTACACCATTTGGGTTCCACAATCGA
GGGCACAAGGAGACACGAACTCGCCACACTTAACTAGAAATTGATGTAACT
CCAAAAAAATCCAAAATTTTACCTTTGTAAATCAAAACCCCCAATTCAATTT
AATCACAAACCCTAGACGTCAATTCCAAAAATTAAATGTATTGATTCCGTC
GCCAATACATCTCCATTGAACGTTTTCAGAATCCGAAGCTTTACAAAAAGG
AGATAGTAATTTTTGGGACCCAAAAAGCTGTTGGAATGTTAACAGCTGATG
AGAAAGTGTTTTTTGGAAAGAGAGAAGAAGAAGAAGAAAAAGAGCCTGTA
TCTCAGGCAAAGGGTAGCATTGTCATTATTACAGAAAATACAAATAATATC
AGTATCTTTTTGTGGGATGGTTAGTTACTTAATTATAATTTTTTTGTAGATTA
AAAACTCAAATTTCTCAAAATTATACTCTCCTAAGTAGAAAAATTTTACAA
GTTTGATTTCTTGAAAATTGATATTATAATTTATTTTTCTGATTAGGGTGGG
AAGATTCTTTATAATTTTTTTGGTTTACCTGAAAATGAAAGAAAAGATTGTA
AGAAAGATACAACAAGTGTAGACTGGATCTTTTAAAGTCCAAACCAAAAGC
CAAAAATTAGGTAACCTAAATATGTAAGACTTTATTTTTTGGTTTTTCTTATT
AAAACAACATTTCGATAATTCATTATGATATTTTTTACGCTATGATCCTCAG
CCTTAAACTTTCATTCGTATAGAAGGATAATATCATAATAGTACAACTCTTT
TAATTGCCACCAATCAACTTTATTGTCTGCTTTCAAAAATTTTATTTTTTATA
AAATATTATTCATTTTAGCTATAACTCAATTTGGAACTTTTATTCGTCCCAA
ATAAAATATCTTTCCAAGAGAGATGGAAAAATAGCTTCATATAGAGATATT
TTCAACAACTTGTCCCTCTCTAAACTCATCCACCTTCCAAAACAGAGAAGG
GGAAAATACCCAGCTTTCTTGTACAAAGTTGGCATTATAAGAAAGCATT
GCTTATCAATTTGTTGCAACGAACAGGTCACTATCAGTCAAAATAAAAT
CATTATTTG
AT5G44050pro4 (−903 to −1; SEQ ID NO: 83)
CAAATAATGATTTTATTTTGACTGATAGTGACCTGTTCGTTGCAACAAA
TTGATAAGCAATGCTTTTTTATAATGCCAACTTTGTACAAAAAAGCAGG
CTCTCTTTCTAATTTCAGGTTATAATTTATTAATTTTGGCGGAGTAAAAGTA
GATGACCGTTACAAGTCTGATTTATTAGACTGTGAAATTGGACCGTTGTTAT
GTGGGCCATGGCTTTTATTAAAAAAAGAAGAGAAGGTATATTATTTAAATT
GGAGATAATGGGCCGTTTTAAACCCAATTATTATTGGTCCACTAAAGTTTTT
ATATCCTCTAACTTCGACGAGCTTGATATAGTTTTGGACCTTTTGGTGTGAA
CGGTCACATTCAACTAAATTAAAAAGTCCAACAAACAAAATCTGGTCATGA
AAAGCTTGGTGTGATGTTTCTAATAAGTAAATTTACTGAGGTTAATTGGTTG
GTTTAACTTAAATGTAATCCAAACTCCTCTCCCTTTAGAGATTTTCAGTTGG
GAATGAAAACCTTTAAAGCTTGCACCCTAAAATGACATTAATGGTTATAGA
TATAGTTTGTTTTCATGTTTCTTTTTTTTTTATATTTTCCTTTAGTTTTTTCTAG
GGTTGGGACTAAATAATCGGACTCGGATCCGAGATCCGATTTGAAAAGCTG
GATACCCAATTGGGATGGATCCGCTTCCGGATCCTGAATTTTTAGATTCAGA
TGAATATTTTTTTTTAAACTAAAGAAAGCATATCAGCATCACATTTTTGTGG
TGATACTGCTTCAAGAATCTGTCACATATCTGTCCAAAAGAAAAGAATTTG
TCACATATTGTATAATTTTAATATATTTATTGTTTTAGTTTGAAAACAAACG
TGGAAAAAAACATCTTACAGGTGTCAGGTGTGCCGCGTCGTCCCACTCAAA
GCCTATATCATCAATTTTCTGGCTGTTCTAATCTACTCAATTTATTTTTTTAT
TGTTAATTTACTGAAGATCGGCGACCCAGCTTTCTTGTACAAAGTTGGCA
TTATAAGAAAGCATTGCTTATCAATTTGTTGCAACGAACAGGTCACTAT
CAGTCAAAATAAAATCATTATTTG
AT4G04330pro5 (−1466 to +34; SEQ ID NO: 84)
CAAATAATGATTTTATTTTGACTGATAGTGACCTGTTCGTTGCAACAAA
TTGATAAGCAATGCTTTTTTATAATGCCAACTTTGTACAAAAAAGCAGG
CTTTTTAAATATCTGTATTTTGCCTCCTTTTCATTCTATTTTGTTTGATACAA
ACGATTGTGGTTTGTAATGTTAAAATTAGGAATGTTATTGAATGATATGTAT
ATTTCATAAAAATAATAATAATAAAAGTAGGATGAATAGTAAAATTCCAAG
GCATTTCATAATTTACCCATTACATGGTCAAAATTTATCAATATTTTAAAAT
AATAATAATCATCCAATCAAGATTTTGGGAATAGAATATCTTAAGAACTTA
GTATAATTACATATATATATATATATTCCCTTTTAAATGTATCAAAAACAAA
CTAAGAACATACAAGGAATTTGATGTAGTACTATACAATTTACATGCAAAC
AGATGTAGTACTATTTGATGACAAAAAAAAAAAAAAAGATGTAGTACTATT
TTATCTTTTCATCGGAATAATTCGGTCATGAAGCTATTAATTGGTTTTAATG
AGAATTTATTATAACAGTTGTTGCCACACTGTCGAAATACTAACGCCTAAC
GGCTAGTTAAATAATTAACACGCGGTGAGAAGTGAGTGAGTTACACGAACC
ACTAAGAATCTAATATAGGAAGATAAGATAAGCATTTCACACGTGTGGTGT
GGACAATTTAACAGTGTTAACACGCGCATGGCATGTGATCTAGAAATTAGA
ACATTAATTTTAGCGTTTTGACTTTGACCTTTGAATCACTAGGCGTAGGTAT
TTACACGTGTAACAATATAATTTTTTTCAATATGTGATGATCATGGGCCAAC
GTTTGTGGGTAAAGGTGTGGTGTTCGATCATGATCCACTTAAATTTACTGAA
TTTTAGAATTATAACAGCAGAAGGATATAAGTAATATACCAAACTTAACTA
TAATCTACCTCTCCTTGTCTATGTATACTAAATGTCTAACATGTAACACAAA
GCTGTACAAAATTTTTAACTCTCAAATTTTTTGAAATAATGCAAAGCTGTAA
AAATAGCTGTACGAGAAAACTGTACAATAAAACTGAAAATAAAAAAATTT
GTAACGTTTTTGATAAAAGTTTTGTAAATGTATAACCATCAAAACTGTACAA
CTTCCAGCTTTGATAATGAATTACCATTCAAAGCTAGAGTTTCGAATTTTTT
CATTGTATACAACCATTTGAACACAACTCTTTTCAATTATGCCATACATACA
TTTAGTTAATAAATTTTACCGATTAACTAGTACTGACAAAAGAAACAAAGA
GTAATTATATTTTTTTGATAAATTGTTTTATTAGAAAAATACTTAAAATTGA
TAAAAATAAATAAACCCAATTGATATATTTGATATTACAATACCAGATATT
GAAACAAATAAGACATGTTTTGTCTATATACTTCCAACTAGAAGATATTTAT
TTATCCATATCCTAGATATTTTAATGTGTGAATCTAATACATTCTCTTATATA
CGACCAAATAGTAAAACAATATGCCTCTCCTGCAATTTTTCTTCATCCAATA
TTTCTACCCAGCTTTCTTGTACAAAGTTGGCATTATAAGAAAGCATTGC
TTATCAATTTGTTGCAACGAACAGGTCACTATCAGTCAAAATAAAATCA
TTATTTG
AT4G23290pro6 (−1105 to +16; SEQ ID NO: 85)
CAAATAATGATTTTATTTTGACTGATAGTGACCTGTTCGTTGCAACAAA
TTGATAAGCAATGCTTTTTTATAATGCCAACTTTGTACAAAAAAGCAGG
CTGAACAGATAAGTGAAGTTTCTCTGCGATTTTTCTAATGTTGAATCCATCA
AACTAATAAGTGGTCCCTAAACCTACATAGTCGATGGTAAAATGTCAATAA
TGTTTGAAAGTTTAGATAATACCCTGAAAATGACGAGTCCCTTCGTTTACTT
GTAATAATGGGTGAGAACTACGACACAGTTCCATAGCAACTTTCATATTTC
GAGAATTAAATTATATTCCGCAGCAAATGCTATGTCCTTGTAAAGCTCTGTT
TTTAGTCTATGACCATACTTGTAAAACATGTTGTTTTTTTTTGTGTGAATTAA
CAGTTCATTCAAAATAAAAATAAATAAATAAATAATCGAAAATGTAACTCT
GTGGTTATTGTAGCTTGAAAAAACGAATAATCAAGTGTGTTGTTCATTCTCT
TCGTTCGTTGCACACTGGTATAGCTTGTTGCTGTCATCTACTGCTGACTCCA
GCGATAATGAAACGATCAGAACCACGAAATTTACTAGAACTCAGCTTATCG
GAACTTGGAAGGGGACCAGATGAGTATTAGGCTAATTCGTCGTGTTGTATT
TTTCAACTAATGCGTCAGTGTCGTTTTTATTTTCAACTAATGCGTCAGTGTC
ATTAGTTTCGGAAATAAACGATATTTGTTTTGTTTTTGTATTGGGTCCTATAT
CGAGCGAGATTGGCATGTGAGTTGGGTTGGCTAGGGAAAATGGTAAAATCT
CCACATTTTGTTTTGAAAATGTGAAAAATACATTTTTCCCTACAGCGGGGAT
ATGAATCAGTACTATTTATAATGCAAGATATGTAAATTTAAAAGACATCAT
AAGAAAAACAAAACTACAGAATTTCGCTTAAGCTTTCAAAGATATCGATTT
GAATATAATGGTGCATTTGCGGGGTTCAGTTTCCACGGAACCGGTAAATTT
AAAAGCCAAATACCTTAAAAGAGTTGTGAAACAGGGTTACAAATATACATA
GTGGATTCGTATGAAAAAGAAGGGAGGAATGAGTCCTACACGTAGTCACAT
CACATATGAAAGAGATTGCTTTTGAAAATCGAATCCTCTTCTAATATTAAAT
CTTTCAAGACTGGAGGTTTTAAACAAGAAAATCAAACTCGACCCAGCTTT
CTTGTACAAAGTTGGCATTATAAGAAAGCATTGCTTATCAATTTGTTGC
AACGAACAGGTCACTATCAGTCAAAATAAAATCATTATTTG
AT1G07180pro7 (−1406 to +94; SEQ ID NO: 86)
CAAATAATGATTTTATTTTGACTGATAGTGACCTGTTCGTTGCAACAAA
TTGATAAGCAATGCTTTTTTATAATGCCAACTTTGTACAAAAAAGCAGG
CTTTAATAAATTAGTAATGAACACCTAGACTCGTATCTTCTAATCTCAATGT
TTAATGAATGGTAAAAATAATTATTTAATTTTCCGTGGTCAACAATGCATAA
TCTTTTTATTTATTTTGTCTTCTTACCTTTCAAAAATTTCTCAACTTGTCAAC
AGAAAAAATAAAAATCCCAATAACAAAGGTGACAACCGAAACAGAAGCAC
ATGACCACAATGCTAAAGATGGATAAAAAAAATAGAGCAAAAAGAAAGAC
AAAAATTTCAGTAGTCAAGAGTATAATTAAGCACGTATAATTTGCAAAATT
TTTATTTTATTTTTATGAACCGTTTGGTGTATATATATAATCCTTGCTTTCCA
GTTTTGATGATCTTTTTGTGCTACTTTGTATGCGGTTAAAGATTGTTGTAATA
GGCAAAGAAATCTTAAGTAATGCCTCAGCTGTTAAACGTTGTGATCTCCTCT
GTTCAAAATATTTCAAGTTGATCTTACTTATGGTAATGCTCTACTCGTGATT
GTGAGTTTGAACTAGTCACTGTTAAGGTTTTCTTTATAATTGATTGTCAAGC
TAATGAATAAGTTTGTGAATGAGGTTTTAGAAAGATGCATGATTGGAAGTT
GTGTTTAGTAAATGCTTCTCATTACAACTAGAATTTACTATAGAATCATAGA
ACGGCCATAACCAAACTTCATGAGTCCGGTGATATTATTGGAATAGAATTC
ACATAATTTTCATACTTTTGTTACTTAGACTGTCTACATAATGCCACATAAT
GAAAATTTGAATTAGAAAACTTGAATACTAAATCTACAGATATTTCAAGTG
ACTTCTAATGTATGACAATAAGACATTAAGACCCCTTCCATATCATGACCAT
TTCAAACTCGTGTCAATATGTAACCCATTTATCGTGGGCCATAAACCCAAA
ATAATAAATCATGTATATAAACGGGCTATTGGGCCATAAACTAGTGATAAT
AAGCTTTGGGGCGACGATCTCTGGATACGTCACCCCTCGCGATACAATTAC
AACCGATCAAGGTCAGCGAATACTCCGACATCCTTTTCTTGCGGCCCACAT
CGGTCTTTAGTGAATCACATGTTTTTTCTATTGTCGTTTCTTGCGCATCAAGT
TCTGCTGAGGTTTCTTGTTATTTTATTTTTGAAATTTTTCAACACCTTTAACT
TATCTCGATTTTGTTTACCACTTAAAAAACGCCCAACCAATGGCATACACTG
AAAATGTTTTCTAAACATTTAATATTTCTGTGGCTACCAAAAAGAAATCAA
GAGTTATTTTCCATTTATTCTGGGTGAAAGAGAAACAGAGTGCCACCTGTC
ATTTCCTAATCTGGCACGTAGGTTTTTCTCATACGTATTACAGTGAATAATA
CAGTATACCAAAGGCGGCTCGTAGCAGAGTTTGTTCGATTCTCTTAACCAC
ATTAGGTTTGGAGTATTATTTGCTTCTCTCGATTGAAGAAGAGTACCTAAAG
AATCACCCAGCTTTCTTGTACAAAGTTGGCATTATAAGAAAGCATTGCT
TATCAATTTGTTGCAACGAACAGGTCACTATCAGTCAAAATAAAATCAT
TATTTG
AT1G65490pro8 (−1479 to +21; SEQ ID NO: 87)
CAAATAATGATTTTATTTTGACTGATAGTGACCTGTTCGTTGCAACAAA
TTGATAAGCAATGCTTTTTTATAATGCCAACTTTGTACAAAAAAGCAGG
CTACCGCTTAATATCGTATGATTAGTATTAAAAATCTTCTCCAGAATTTCAA
CGTTGTTTTTGCTACTCACGCATTGTACCTTAAATGATCTTATTCATCATTTC
TAACAAAACAATTTATGCATTCTTCGCCAGTAGAAGAACCTAGTAGAGTGC
TATCGGCAACAACTCCGTCTTGTTCATGCGGATGCAAAAGAAGACGTCCAT
GCCCACGTCCACGTCCATGTCCACCTCCACGTCCACACTATTCAAGAAATTA
TACAGACCCTTGAAAAAGAAGAATGAAGAAGAGAAAACAAGGATCAATTA
TGGGATTGGTACAATATAGTTGAGGGTATTGTCTAATGTAGTACTTTTGAAT
ATGCTTATAGATTTAGACATATTAAAGACTATTTTCTCCTTTTAAATCAATG
AAGAAAATACTTGAGTTCAATCCTTCTTTTGCCTTTGCATAACCGTCTCTCA
TCCACACCAACAAAACAAATCCCAGAACCTTCTTTTGCAGAATTTTAAAGA
CACACAAAGCAATGAATAAGAACACTTGGTTTACAATAACGATCGAAACTG
GTTTACAATAATGACCGAATATGGTTTGCAAATATAGATGAATTGGAATTT
AATTGATTCGATCTATATCTAAAATTAAATTTCTTGGGTTCCCTAAATACTA
TCCTCTTAGGGTTTAGATTTCTATTATCAAAACTCTCGTTTAATTTGAGCAA
ATTGGTTAATCGGAGAGGTTAGGGAAAACAACGTTTTCTGGTATAAAGAGA
CGAGAGAAACGGTATTGATGGAGTTAAAAGTGATGATGTTGATGAAATACT
GAGTCAACGTTAATAAGGCAAGAGCCGACTGTGAGAAGCAAGGTTTCATG
GTTGGGAATTTTGTTGCGCAACGGAGAAGATGAAGTGAATTTTGTTGCGCA
ACGGATTTCCGCAAGCTTTTCCCGAGAAAACAAAGATATCATCTACATTCT
ATTTTTGTGCTGTAACTTTTCTGAATTTTTTGTAAACAATTTTTTGTGATATA
TATATATATATAAACAATTTTATATCATTAAGTATGGTACTCTTTAATGTTTT
TAACGGAACATGACCAAAACTGCTAGTGAAAGCATTTTGTCTTAACTTTAC
AAAAGAAGTTATCTTTTTTTTAACACAAACTGGTTTTCTTCGGTAAATAAAA
AGACTAAGTTTGTAAATTTATTCTTAGACAATTATTTACTATTATTGCCGAC
TAATATGAAAATGCAAAGAAGTCGTATTTGGCATTATCCAAAAGAAGGGAC
AAAACACTTATCTCTTAAAACTTAAATTTTAAGCCATTCGTTTACCAACAAT
GAATCTTGTGGCTGATGTAGAAACCGCGTTCACTTGTCAACATTTAGAAAT
AATGTTGGCTTTCAAAGAATTAAATAGAAACAACCAAAATGTATGAGGTTG
AGCGTCTTCTATATATTTATTACAAGACTTGCGATGACCAAAAACGCAACG
AAGAACGAAACCCAGCTTTCTTGTACAAAGTTGGCATTATAAGAAAGCA
TTGCTTATCAATTTGTTGCAACGAACAGGTCACTATCAGTCAAAATAAA
ATCATTATTTG
AT1G21670pro9 (−1332 to +11; SEQ ID NO: 88)
CAAATAATGATTTTATTTTGACTGATAGTGACCTGTTCGTTGCAACAAA
TTGATAAGCAATGCTTTTTTATAATGCCAACTTTGTACAAAAAAGCAGG
CTAGCTTATAGCGTAGAGATGATTCACTGATGTTAGTTTCATTCCTATGGAA
TAACAAAATGCTTTTGATGGTATCTTCATGAACATGTACGTTCACAACTATC
TTTGTAGCTCTATAACTATTTGGTAACTCCGGTTTAAGCAAAGTTCTACACT
TTAATAATATCGACTTCGTTAATATATACAAATGAAAATAGTCTTATAGATG
CGAGAGCAAATGTTTGAGGGTAGGTTAAAGGAATCTTGAGATATGGATAAA
CGACACTAAGTTGTGTCGTAGCGAGACAGATCCAAACTACGACAAGTAGTA
AACGGAGATAATAATATCCAAACCATAAGAATCCATGAAAGCAAGTAGAC
AACTGCGACTTTGCCTCACCAGTCACCATACTAATAATTGGAGAGGTGGAT
CTCTTAGGAATATTTACTTTTATAAAAGATCAGAGGCTAGTCAGAACTCAG
GGACTAAATTTTATTTTCAGTAGTGACATCTTTAAAAGACAACAGAGATTTA
TAAAACTCCACGTGTACAGAAGTGAAACAGTCTGACATGATGCCTGATGCT
AACTAACTATGTAAGATAAGACATATCTTACATAGTTAGTTACCATGTAAT
AGTAAGTGATAACCCAAAAATGCAAAAAAAAACATCCAACTAGAACATGT
GATATGTCAGTATGTGTATGAGATCATGTGCACAATAATATTATCGGTATTT
GTATGTCTAGTTGTCTACACTCTACAGCTCTTACTGGAAATAGATTTTGAGG
AACAAGAAATAGTTGAATGAGTCATTGCTATCTTCTAGATTTTTTTTTTTTCT
GTCATAATATCTTCTAGAATTTTATTACTTGGGAAAGCGATATATGATATAT
TCTTTTTCCAAAATTTACTAATTAAAAAAAAAAAAAAAAACTAAGCACTCT
GTATTTATTGCCATATTGAAAATGCTCTTTCCACCAATATTCCTTATTTGCCT
CAAATCATTACTTTCGGATTCTACTGTCTTGAACTGTGTTCATGTGTGTATTC
CCTCATCAATCACCTTCAATTCATATTTTCCTATTTCCAAAAATAAAAAGAT
ACAGTATCTATGTATTTAATTATATATCATATCAATTATATCATAATAATCA
TAAGATCCTTTTTATCGAAATAAAAAAGGAAACAAATCCAATCATAGCAAG
CTTTTTCTTTTATTTAATAAACAAAAATAAAAAGCTTCCCGAAATGGTTAAA
ATCCAGAACCACTAAAGTCAACCAAATTTGTCAAATTCATCCACGTCATCA
GTTCCATCTATAAAACGCTCACGCCATTCGTCAAGTCCCAAAACAAGAGTC
CACCACCCAGCTTTCTTGTACAAAGTTGGCATTATAAGAAAGCATTGCT
TATCAATTTGTTGCAACGAACAGGTCACTATCAGTCAAAATAAAATCAT
TATTTG
AT2G17450prol0 (−1397 to +103; SEQ ID NO: 89)
CAAATAATGATTTTATTTTGACTGATAGTGACCTGTTCGTTGCAACAAA
TTGATAAGCAATGCTTTTTTATAATGCCAACTTTGTACAAAAAAGCAGG
CTAGTAAAGAGAATGATTATTGAGAATTTGAGATTGACTTTATATATGGTTT
AGACACGGTTTAGACACGGTTTAGAGCTTGATTTAGTCATAAAAGAGTCAA
GTGGTTGAGGTGTGAACTTCATATTTAAAGTGACGAATATCAAAAGTATAT
AGAATAGACGTGTACCTGCGGTTTAATAATTCCTATTAAAATTCACCAATAC
ATTACGTGTCAAATTGTATCCTACAGTATTTAGATTTATAATATATGCATCG
CTACCAAATTTATGGACACGTTGATCCACTTTCAAAGATTCTGTTTTCGGTA
ATAGATTTAGAATCCAGATCTCACCTAGGCTTACAAAAACAAAACTTACAA
GATCCAAAATATATTAAAAGACGATTTAAACAAAAACCAAATACATTAGAA
GCAAAATGTGAATTTCGAGGTTCTAGCTTAAAAATAAATCGTATATACTAA
TAATGGTCGGTTAAATGGCTGGTCAAAAAAAAAAACTGATATTAAGAAACT
AGAATGTTTAAAAATATTTTAAGAAATAAAAGTGCAATAAGCTAATATTGG
CCGGTGTTATTAAAAAATAACATACTATTTCCACAATTTGATCTCTCATTTG
TCTTTTTCCATCTATTTTTATTTATTATGATAGAAAATCATATTATCCAAAAT
ATTTTTAAATAAATGTAAGAGAATTAAAAATAAAATGGTCTAATCGAAGGT
AGGTTTAGCCGTTTAGGTGAGAAAAGAGCTTACTTATACCTTTTGATAATGT
GTTCGTCAAAACAGAACCTATAAAGCCAACCTCCACCGACCCATCTTTTCTT
CTTATATTATTTACTCCAAGTTTCCTTCCAATTTCAAAAAATATAATCATCTC
TCTCACTATCTGAATTTTAAATAACATACAACAAATATTTTTAATATATAGA
ATAAAATCAAAATAAGTCATCATGATCTCAACATCAGTTGACTAGTCATAA
GAGAATTTCATAACAAAAATTGAACATACACACACCCAAGAAAAGAAAAT
AAACTTTTTTATTTATTTATAATCCTAAGAAAAAAATGGTTTGTGATCTAAG
AAGTTGGAGATAGATAGATGCATCTCCATTAAGAGCAAAATGTTTGTTTTT
AAACAGAATATGTGTCCACACGAAACAACAATACTCTAAATAGGAGATGC
AAATTGCATGTAAACACTAATTCAGCCAATAACTTCGAATAAACAACCAAA
TAATAATACTTACTAATTTTGTTTCCCTTCATCCAAACTTTTCTGCGTGTATT
ATTATTATCATACAGATTTGATATTAAATATTACAAATATCTTATTTGTTTGC
AATATTATTATATAAGTAAAGATGTATATCATAATGTATGTATCCTTTATGT
GTCTCTATTATAACGTGGATCAAGATTCTTTCTTATCTTCATCACTCCACAC
ATTTTCTTGTCTTCAAACTCACACAAAGAAAGAAAAGTCTCCAAAGCTCAA
AAAGCAACCCAGCTTTCTTGTACAAAGTTGGCATTATAAGAAAGCATTG
CTTATCAATTTGTTGCAACGAACAGGTCACTATCAGTCAAAATAAAATC
ATTATTTG
AT4G01130pro11 (−1349 to +35; SEQ ID NO: 90)
CAAATAATGATTTTATTTTGACTGATAGTGACCTGTTCGTTGCAACAAA
TTGATAAGCAATGCTTTTTTATAATGCCAACTTTGTACAAAAAAGCAGG
CTAAAGAAGAGAGAGGAAGGAGAAGAGAAGAAAAAGAAGAGAGACACAA
CGGAGCGCCAAGAGGCTGATGAACACGTCACCGTACACGTGTCATGATCTT
GAAGGGTTTGCAAAGGGAACGCATATGCTGAGCTGGCAACCCTAGATCTGC
GCTGGACATTTTAAATATCTGACTTAAATAATGATTGGTACACGTAGTCATA
ATCGCCACCGTTCATCTTGAGATCTCTACGTAGACTTGACGTGCTGCTGATT
TTATTCCTTTTAAATAATGAAAATACAGAATTAAACTATAATGTATAATTCA
TTTGAGATCCACAGATGACGAAACGTGGACTACCAAATCAAGCATATTTGT
TTTTACCATTTAATCGACGGCTAATATTGATTTCATCTACGGTAAAATATAT
CTTTTTTTAACCAGAAAAAGGTTAGAGTGGTCCCCACTGTAGGATCTACTGA
CTTGTGTCGGCCGTTAGTGGTTTTATAAAGCTGACGTGTCCCACTGAATAAG
GAATACCGTTGTGGTCCCTACGGACAACGTGGGATTCGACGCCAGCTCATT
TTTTAATTTTTTCTTGAAATCTTTTTTAAAATTTTAGACGATGACTCAATCTT
CGCCACGTAGGATCCACCCAATAAAAAAGGGTTAACAAAATCTTATCTTTA
ATGCTAAATTAGTTGAGATTAATCCATGTTGTTTAAATCCGAAATGATGCAT
ATAATCTTGTTTCTTATAATCATTAAGATTTAGACTGAAGATCTAATTCCAA
TTTAAGAGAGTCACTAAAAAAAGAATGAATTCAATTTCAGACAAATCCGAC
AAGGTCAAGGTGACGTGTTCTTGATGCCAATTCTAGTGGGAGCCACTTGAC
GCGTGCAGTTAGACTCCCGGTCCAAGACATAAATTTACGTTAATACCCTCCT
TTATTGGGTTATTATTGGGCCGTAGTTGAATTATTAGACCCAACCTTTTTAT
CCTGTTCTTGATTGGCACATACTTTGCAAAAAGTTAACAAAATAACTTTTAT
TGCAAGGCATTACAAGAGAAATGTCAAATTTGGTTGTTGCATACATGACAT
CTTATTCATATCCAATCCATAAATTGATGTGTTGTTATTCAAACTGGTCTTTT
GATGTATTGTTAGACATATCTCATATATATTGAACCCTTGGAATCAATATAA
TAGATTGGGCTTTATTTATCTTTTATTGGGCTTAAAGGGAATTGTTGGACTA
AAAAAACCATTAAGGCTATAACACACTAATTACACGTACAATGAGAGTGAG
AGTCACGGACGGGATGATTACAAGAATCATATAGCACCAAATATCTCATCC
TCACTCTCACATACAAACACACATTTTGTTCACACAGAGATAGACACCCAG
CTTTCTTGTACAAAGTTGGCATTATAAGAAAGCATTGCTTATCAATTTG
TTGCAACGAACAGGTCACTATCAGTCAAAATAAAATCATTATTTG
AT5G19240pro12 (−1420 to +80; SEQ ID NO: 91)
CAAATAATGATTTTATTTTGACTGATAGTGACCTGTTCGTTGCAACAAA
TTGATAAGCAATGCTTTTTTATAATGCCAACTTTGTACAAAAAAGCAGG
CTAAGTCATACAACATCAGTTTTTGTTTTGTATTCAGATTTTAAGACGTTCC
TCTATTGTCTATTTGTCTTGATCTGTCTTGCAATGGCATATTCTGCTGGAGGA
AACCTATGTCAAGGAAAGATACACAAAATTTGCCGGATGAAATAGTGTTAA
CAATATTTTTCTTAGAGCATACTCATTGCTGAACTATTTTTTTGAATGTTTCA
AAACCAAAATATTAAATATTTTAATATCAAAAACAAACTAACTATTAAAAA
GAAGACATACGGAGAAAAGAGTCTTTAAACAAACGTTACAAGGTCTTAAAT
GTCTCTAGGAAGACACATATCTCATATCGATTCTTTAAATTCTTTTATTTTTA
TGACCAATGGGGATGGTCTTAGGAATATAATATCGCAATGTTGACCAATAA
CCAATAATATTAATGTAATTTCGCAATATAGTCTATTATTTTTATTTTTATCT
TATATTTTATTTTATTTTTTTGGTCAAATTTAGTCTCCTATCTTATGTCAT GC
AAATAATGGAGATGATGATGTAAGATAAGAAAGAAAATTCAAGTTTTTGCT
GAATTTATTAGTATTTTTGAAAAAATAAATAAACTAAGAATAAATGTTTGG
TGGATTCAACTAATTGTATATTTATTCCAATGTTCAAAAAATCGTTAGGCGG
TAACTAGGTGTTCGATAGAGACTTAGCACCCAGAGCGAGTAATCGGAGTCT
AGGCGATAGCACATTATTTCTTACTTTTAAATATTTTTTTACAATTTTCTATC
AAAACATTGGTTATAAAATATGAAATTTTAAAAATGTTATCTATTTAAAACT
TATTATATTTTCACACTTTTATATATAAAAATAAAATAATTTAGTCTTAAAA
CTAAAAAAGTTGAGAATAATTAATTCATAATTTAGAATTTTAGTACTTAAAT
ATTTTGTTTATCTTACTTTGATTTAAGTATTTCACTTATTCAAGATGATGTTA
TATCGAAAAGAAAAAAAAAAACAAATCAGGCACTAAATCGGTCAATTTGA
CTGATTTAACCGATTAATACTAATTTTGAACGCCTAAACCAGTAAACCAAT
GTTTATTTACCATCTAAATAAATTTTTTAAACATTGATTTATTATGTGAGAG
AGAAAAAAAACAAACTGATAGAACCTTTTTTTTTTTTGAACAAACTTGTAGT
CTTGTAGAACTCAATATCAAGTATTAAATGGCCATAATTTCGCTCTTAAATT
TGAATGAAGGAAAGAAACTTCCTACTTGGTGAAAAAAAAACAAAAGGAAA
GAAATACCCCACTAAAACGAGTAACGACATCTTAATGGGGTCGTTATTTTT
GTCTACGCGGCATCAAATCGAGTGGACAATAAGAACTAAACCGAAGCAAC
GACTTTGAATAGTCAAGCGAAAAGGAGCCAAATTCTCTAATAAATAAGTGA
AGATTCATCGCCAAGTATCATCAGCAAACCTAAAGCTAAAAGTGCCTCTGC
ATCAACCCAGCTTTCTTGTACAAAGTTGGCATTATAAGAAAGCATTGCT
TATCAATTTGTTGCAACGAACAGGTCACTATCAGTCAAAATAAAATCAT
TATTTG
AT5G58120pro13 (−852 to −1; SEQ ID NO: 92)
CAAATAATGATTTTATTTTGACTGATAGTGACCTGTTCGTTGCAACAAA
TTGATAAGCAATGCTTTTTTATAATGCCAACTTTGTACAAAAAAGCAGG
CTAAGTGTAGATTATTACAAGTATATATATATGACTACTATATTTTGGTTAT
ATGCTTATACATTTTGGATATATGTTCGGGTACTCATTCGGTTCGAGTTTGG
TTATGGTTCTCGGGTCTTGAGGTTTTGATCCCGTTCATGTATTTTTGCCAGTT
CGAGTTGGGGTTGGTTCTGTTTACTTTTTCTAGTCCATGTATTTTGCAGACCT
ATTAAAACCATTCTGTTTTTTTTTTGGACCAACAAAACCCATCCGTTTTTAG
ATACGAAAATAAAATTTTATTAAAACCATTATTTTTCTTGGACCATCAAAAC
CCATCCGTTTAAAGATACGAAATGAAATTCGATTGATAAATACAAAATAAA
GTTCACCAAACTTAAATAAAAAGGCATAGATGGGACCAATGAGAAAGAAA
TTTCTTTTCTCCTCAATTTCCCCAAAAATATATAAACCTTAAGTTTACTTTTT
TGTTGCAAGGAAAAACATTAATCTTTTTCAACTTTCTAAAAACAATCATTTC
AAACGTTAAAGGAACCTCCTCCTTTCTTTACGCGTTTGCAATATAACCCAAG
AAGACCGCTTGTTTGTACAACTTTCCAAAAACCAAACAGTAGTGTAATAAA
CCTCTGACTTCTTTTTTCTTCTCTATTTTTGTGGGTGATAATCAATTCACTCG
GTTTGAAATTTCGTCCACTTTTCAAAGATGAGTGAATGAAAAAGCCACGAA
ACTTTCCATTTCTTCCTCTGTGTATAACTCTCACTGAGTACGACTTGCCATTT
TCTCATCCAAAAAAAATGTTTATCCAAATACATATTTGTGAACTTTGCTTTT
AAACCACTCAAGATTCTTCCCCACCCAGCTTTCTTGTACAAAGTTGGCAT
TATAAGAAAGCATTGCTTATCAATTTGTTGCAACGAACAGGTCACTATC
AGTCAAAATAAAATCATTATTTG
AT3G47340pro14 (−1300 to +200; SEQ ID NO: 93)
CAAATAATGATTTTATTTTGACTGATAGTGACCTGTTCGTTGCAACAAA
TTGATAAGCAATGCTTTTTTATAATGCCAACTTTGTACAAAAAAGCAGG
CTATTTCAATCATTTATAGCTGAAGGTGTACCATATAGATAGATAGGGACA
CCAGCAATTTTTACATATAAAAAAGAAAAAAATATCAAACGATTTACAATG
TATCATGTCGCGATTGGGTCTTGCTGCCTCAAGAATAGGGCTGATATCTCGT
TTTGTCCAATCAAAGAAAAAACACGTCATATTCTTATTTTGATGATTTATAT
ATTAGCATTATCCAAAGTCCAAAGATTATAAACTGAGATTCATCTTCTCGCC
CTTGCACATTGTAGCAACGTGTGAGGCATGTGCGATGCCTATACCTACAATT
CACATGTGATCCGGTATATTAAAATATACATGATTTATGGATACACTCGAAT
ACTTCTCCGATATTCATTTCGCGGAAAGTTGCATATGATCCACTATCTCCTA
TATATTTGTTATATAACACATGGCAAATCTCTCTATATATATTTTTTAAATAC
ACATATATCCAAAATAGGCTTAACTATAACACAAAGACTTTTGTTTACTGTA
TATTAGTAAGAAGTAAATGTATTTTTTAATATTATGATAAAGTTTGTGAAAT
CACCATTTGCAATAGCCATATAGGGTCGTGTTTTAATTTTACAGTTTGTATT
GTTATAATTCGATTCCAAGGTTGAGAATATGTGTGTACTATTAGACTATACA
AATAATAATTCGTTGACGATATTGAATATTTACTAATTATAGGAAGAGAAA
ATTATTTACTAACTATAGTACGATATATTTCTTCTATATGTGTTTTTAACGTT
TTTTTTTTTTTAAATTTAAGTCTTAACTTTACTTCTCATTTTTAATCAAAAGG
AAAAAAATACCAATCAATTTTTCCTAACACAGTTTACTTATCATTTTCATTT
GAAATGTGTTCACTTTCTGATAAAATGCTAATCCTACAATCAAATACACCAT
TGTCGTGATAACACGTGTACGGCTCTAAAGCAATCAGAACAATCATTGGAC
AGTTTTTACACCGTCAGATAAGTACCTATCCACTTGCTGACTCAGCCGGATA
AACCCTAAACCGGAAGTTTGCCCCACCGTCAAAATTGGAAGAAACCGGAC
AAAAGAGAATGTAAAGACTAAGAAGTAAGAACCCATCGGACGTCGTAAGA
AGGTTAATTAACACGTGGAAACAGCTGGTCAGAGTTATCCGGTAACTTATC
CGGTTACAAGTAAAAAAATAATTTGTTCCCATACACGACTCCTTCAGAACC
AAACGCGACATCACGGCGCCGTTTAGTGTCTATAAATAGAGCAATCGGTCG
TAGAAAACCAAGACATCAAAAACACGAATATCGATAGTACACTTCTACGTG
CAATTTTCTCCTTTCTCTTCCTGGACATCTGTCTGTTTATTACATTTTCTTGTA
ATCTCTTTTTGGGGTTTTACAATATCTATCCCCTAAAGTTTCGGAAAATTCT
GTTTTTCTGTTCTCATTCTTCGTGATCTTTTTCACTTTCTTCAAAAAAAAAAC
ACCCAGCTTTCTTGTACAAAGTTGGCATTATAAGAAAGCATTGCTTATC
AATTTGTTGCAACGAACAGGTCACTATCAGTCAAAATAAAATCATTATT
TG
AT3G59350ter1 (3′- downstream region; +2199 to +2629; SEQ ID NO: 94)
CAAATAATGATTTTATTTTGACTGATAGTGACCTGTTCGTTGCAACAAA
TTGATGAGCAATGCTTTTTTATAATGCCAACTTTGTATAATAAAGTTGTA
TTCTTCTGTGCAATAGCAACAATGGAAGATTGGGTTCGGTTTCAGTTGTTGC
CATACCGTATAAATGTGTTCTTAAAGAGAGTCTTTTTGTCGAGGCTTTTCTT
CAGTTGGGATGTATATGTTTTATTAAGGTGATGAGTAGTGATTTGGTGTGTC
TTTTCAAATGCTTTGTGGAGTCTGTTTTTCCTTATAAAAATTTATTCTAAATC
TGGTTTGTATTTTGGGGGTCTTCTTTGCTCTTTCTTCATTAACAGAATACTAA
TTATAAGCTTTTCATATACAAACCTTGAAAGGAATTTTCATCAGTTACTAAT
TCGATTTCAGAGAAATGAATCATTCAAAACACTTGATTAGAGAAATGCTTC
TTGAACCGGGTCGGTTTAACGAAATCCACTGGCTGGAAAAATTATGCTTTT
ATATATATAAGAAGCACCCAGCTTTCTTGTACAAAGTTGGCATTATAAG
AAAGCATTGCTTATCAATTTGTTGCAACGAACAGGTCACTATCAGTCAA
AATAAAATCATTATTTG
AT4G32340ter2 (3′- downstream region; +1566 to +2438; SEQ ID NO: 95)
CAAATAATGATTTTATTTTGACTGATAGTGACCTGTTCGTTGCAACAAA
TTGATGAGCAATGCTTTTTTATAATGCCAACTTTGTATAATAAAGTTGTA
CTCTTTGTGCTGATGTTAAACCGGTGTAATACAATGAAAACTCAAAGGTCC
GGTTTAATCAGGAAAATATCTTCTGCACACATTGAAGTAGATTGATGCTAA
TGTGTATCAAAAGGTCCAAAGCCGCATTATTGTTGCAAAATGCGGATTGCA
AAGAAGATAATAGTGGTTTGTGTCCTTAGGTTTAGAGCTAAAAAAGGTGTG
AAAATGAGACTTGTGAGCGAATCAATTATTGATCAATGGTTACGAGAGATG
TCACGCTCAACTGTCGTTATGTCTTTGACAGTTGCAATTTGCCCATAAAACT
TTCTTGCTAGAGGTTATCCGCAAACAAACCACTAATTCAACCTCTTAGCTAC
AATATCTTCATGTACGTTTTTGTCGAAATCTCAAAATCCATCTCCTACAATA
TCATGTTTACTAATTACACTTTGATGGATAGCCACAAAATTTTGGAAAGAA
GAGAATCAATTATATAACAAAAGAATTTGCACATAAGCCATAATAACAAAA
ATAAGAAAAAAGGAAAAGAAAAGAATACACAGACAGAACGAAAGCAGTA
TCTCCTGAATATTCACCTTTTAGGATTGAAAGCATCAAAAAGAAAAAGAAG
GAAGATCTTGACATAAAAGAAAGAAAAAAACACCTTAAAAGATTAAAAAC
ATTACCATCAAACATAGGAATATATAAAAGCACAGCAACCTTTAGAACCAA
ATCCACATGATTCTGTCCACTCTTTTTACCCATCTCTTCTCATATAAGTTTTG
GCTGAAGATATATATAAATATTATACGGTTTCTTTCTCTCTTGTCCTCCTTAC
TTAATGCAAGAGATATGATGAGTCTTGAGAGTAATGATCGTACCGCAGAGT
TTCACCCAGCTTTCTTGTACAAAGTTGGCATTATAAGAAAGCATTGCTT
ATCAATTTGTTGCAACGAACAGGTCACTATCAGTCAAAATAAAATCATT
ATTTG
AT5G23240ter3 (3′- downstream region; +1869 to +2113; SEQ ID NO: 96)
CAAATAATGATTTTATTTTGACTGATAGTGACCTGTTCGTTGCAACAAA
TTGATGAGCAATGCTTTTTTATAATGCCAACTTTGTATAATAAAGTTGTA
GATTCATAGATCATATATATGTACATCATATCCCTCTTTAGAGCAGGTACTC
GTGTTCACCTGCAAATGTAACAAAGAACATTATACTATACAACAAATATAC
ACATTGAATTATACCTGTATAACCAACATAGGTCAAGATTACATCATACGT
GGGCTAGGCCCATTTTATATTGGCCCAATAAGTGAGTGACTAAATCCTTTCG
TTCCCAAATATATCTCCACCGATCAAGAGATTCATCTTCCACCCAGCTTTC
TTGTACAAAGTTGGCATTATAAGAAAGCATTGCTTATCAATTTGTTGCA
ACGAACAGGTCACTATCAGTCAAAATAAAATCATTATTTG
AT5G44050ter4 (3′- downstream region; +3727 to +4226; SEQ ID NO: 97)
CAAATAATGATTTTATTTTGACTGATAGTGACCTGTTCGTTGCAACAAA
TTGATGAGCAATGCTTTTTTATAATGCCAACTTTGTATAATAAAGTTGTA
AGGTTGAAGAATAAGAATTAAAAAATTGTATTTAAACTATAAAATATGCAT
ACATAATAAATTTTGATCGTTTTTAACTAATAAAACATATGGTGTATCATTT
CAATCTCACATGAATTAAATCTTGGTGTGTATAGACTATACAGTATAGTAGT
TTGTTTTGTAAACCGAAATCAGAACACTGGCTGCTGGCCGGTTTACTTAATT
TATGAATCTATATATACATTTTTGCAGTCATTTTGTGAAATAAATCCTGTAG
TTGGGACTTATTTACAATGGCTGCCACTGGATTTTAATGTTTGTTTTTGATA
ATTAGAAAAAAAATCTTCGAATTAAATATTTTACATTTAACAATCTTCCCTA
AATCTCTCCACATTAACTACACGGTTAGTTACTAAAATTAAACTTCCAAAAT
ATTTAATATCATTTAATTACTACAAAATTATCATTTTTGATATTGTTTTTCTC
CATGACTATAACAATTCGACTATAATCATCAACACCCAGCTTTCTTGTACA
AAGTTGGCATTATAAGAAAGCATTGCTTATCAATTTGTTGCAACGAACA
GGTCACTATCAGTCAAAATAAAATCATTATTTG
AT4G04330ter5 (3′- downstream region; +1899 to +2072; SEQ ID NO: 98)
CAAATAATGATTTTATTTTGACTGATAGTGACCTGTTCGTTGCAACAAA
TTGATGAGCAATGCTTTTTTATAATGCCAACTTTGTATAATAAAGTTGTA
AACCGAATATCTCTTCGAATCACATTCATATATATAGAGTCTTGAGAGTATA
CACACTTGAAACCGTTTGTACATACATATACATACCATTGTGCTATGTTACT
CCCAGGTTTTGATACCTTAGTTTTTTTTACCTGCAAATCGATCAAAACCCGA
TTTTCTTTGCGGAGTTACCACCCAGCTTTCTTGTACAAAGTTGGCATTAT
AAGAAAGCATTGCTTATCAATTTGTTGCAACGAACAGGTCACTATCAGT
CAAAATAAAATCATTATTTG
AT4G23290ter6 (3′- downstream region; +2918 to +3417; SEQ ID NO: 99)
CAAATAATGATTTTATTTTGACTGATAGTGACCTGTTCGTTGCAACAAA
TTGATGAGCAATGCTTTTTTATAATGCCAACTTTGTATAATAAAGTTGTA
AATTGGGCTAATGATTAACATGAATATTTTTCATAAGTCTAAAAATATGTTA
TTCTCTCTCTTTCAAAATACATTGAATTTGGTATTAGTTACTTTTATTTATTT
AAGTTTGGTGTTAACTTTAGTACTTTAAGCCAGAATTTTCTTTGAAAATCTA
AACGACCTTATTTTGAGAATTCTTTAAGAAAGTAAGTCTTGAAACAATTCG
AACAAGCTTAAGCTTAGTTTCAGCTTCTTATTCTTCCTTAGTAATTTCTCTTG
ATCCCGTGGCAAGTAGATTTATTCCTTTATTGTACGTATTGATGATGCCTCG
ATCACTTAGATGAGTCCTTGTTAAAGGGAACCAAACTTCAAATCCGACTAT
CATTTTCTTATTTTCTGGACAAAAAGTCTAAACTCATATATTACAGATGTTT
AAAATTTTGAATAGTTTTGTCTTTAACGAGGAGCTACACTAGTAATGGAAG
CTTCGTCGATTGAAAAGAGGTCAGATGTATCCACACCCAGCTTTCTTGTA
CAAAGTTGGCATTATAAGAAAGCATTGCTTATCAATTTGTTGCAACGAA
CAGGTCACTATCAGTCAAAATAAAATCATTATTTG
AT1G07180ter7 (3′- downstream region; +2455 to +2954; SEQ ID NO: 100)
CAAATAATGATTTTATTTTGACTGATAGTGACCTGTTCGTTGCAACAAA
TTGATGAGCAATGCTTTTTTATAATGCCAACTTTGTATAATAAAGTTGTA
TCCATATCCCCTCCACTTCGCCACGTGCTTCTTCTTCTCTATGTCTCTATCTT
GTTCACTTTATGACCTCTAATCAGTTGAAATCATATGTTGTTTACTTGGAAC
AATTCAATGAAATTCAGCATTTTAGAAAGACAGGGTATTGACTTTGAAATT
GAATCATCTGGTTTGACTGATAGTCAATTTAAATGGTATTAACTTTTGACTA
AGCACAGTTAGTTTTCAACATTTTTAAAATTGAACAATTAAATTGAAAAAA
CCTATAAGCTATGGTTAAAGATTGATTAGTAAAAAATGTTTGCTTTTGCATA
AGAGTAGAAAAAGTTTTATGGGTTTAATATTTTTTGTATCAAACATTTGAAA
TATTTCTTGTATATCTGTAAAATTATTTTAAAATATCTATTATAAGATTTATA
TGAGTTTTCCACTTCCACATGATTCATGTGATACAGAAAGTGCATCTCAAAA
CTTCTAGAGTTTCCCTACCAAAAAAAAAAAACCACCCAGCTTTCTTGTAC
AAAGTTGGCATTATAAGAAAGCATTGCTTATCAATTTGTTGCAACGAAC
AGGTCACTATCAGTCAAAATAAAATCATTATTTG
AT1G65490ter8 (3′- downstream region; +406 to +905; SEQ ID NO: 101)
CAAATAATGATTTTATTTTGACTGATAGTGACCTGTTCGTTGCAACAAA
TTGATGAGCAATGCTTTTTTATAATGCCAACTTTGTATAATAAAGTTGTA
TACTTTGAGTTTGAGTTACTCTGTGTTCGAATTTTAAAGTATATGTGGTTTTC
TGTTTTAGTTTCGTGTCTCAACTCTCAAGTGTAGAGGAATGTTATAAACTAC
TATGCAATGAAGGAACTAATACTTATGATGGTATTTTACTAATTATGTTATT
ATTCATAATTCCATGCATTAGAGCCAATTGTCGCATTTTTTTTCTTTCAGAAT
TCTTCAAACTTGTCAAATCGAAATCTCTTCTTTAGAAGCGACTAGATTAGTT
TTTTTCTTCAAAAGAAATTCTCTACTGAATTTATAATTTAAAGAGTTCACGA
GCTGCCTACTAAAATATGAAAAATATTTATGAATCCAGCAATACAAATTGT
AGCTTTGCAATACAAGAAAGAACAACTTTTCATAGAGATCAAAAACGCTAG
ATAAAAAAAAAACGGGGAAGACTAACTAGTAAGTACCACGAGTATAACAC
ATTTTTTGGATTTAGTTTCTATGATTGCTTTCGCCACCCAGCTTTCTTGTAC
AAAGTTGGCATTATAAGAAAGCATTGCTTATCAATTTGTTGCAACGAAC
AGGTCACTATCAGTCAAAATAAAATCATTATTTG
AT1G21670ter9 (3′- downstream region; +2124 to +2607; SEQ ID NO: 102)
CAAATAATGATTTTATTTTGACTGATAGTGACCTGTTCGTTGCAACAAA
TTGATGAGCAATGCTTTTTTATAATGCCAACTTTGTATAATAAAGTTGTA
TTTGTTATGTAACTTATTCTTCTAATAAAAAACTCCGCTAGTTCATATCTTGT
TAAGTATTTGGTTAGCCTAAGAAATTATATAGCTTGAGGTTTCACATTTTCA
ATATTTTTTAAAAATAATTTGGGTCAATATTGATGTTGGAAATGAAATCAAC
GGTTGAATTATTGTCGTGTGCTGCTTGCACCATGGTCCATGCTAGATGGACC
GACCACTATTTTTCCAAACAGTGCCTATCCTATCAAGTAGATATTTTCTGAA
TACGTAGATAATTGTAGAATACAAGAAAAGAAATATCCTCTGTGGAATAAA
TGAATAATATACTTTTGTCAGAAACGTTACAAGTTAAAATTCCACGACTGAT
TGCCACGTGTAAGCTTATCTCAAAAGGGCCCTACAGTACCATGATGACGTC
ATCTCTTACACCACTCTCTGAAAAATTCCTCCGCCTTATAAAAAAACTCGAT
TATCGTCTTCACTTAGTCACCCAGCTTTCTTGTACAAAGTTGGCATTATA
AGAAAGCATTGCTTATCAATTTGTTGCAACGAACAGGTCACTATCAGTC
AAAATAAAATCATTATTTG
AT2G17450ter10 (3′- downstream region; +662 to +1161; SEQ ID NO: 103)
CAAATAATGATTTTATTTTGACTGATAGTGACCTGTTCGTTGCAACAAA
TTGATGAGCAATGCTTTTTTATAATGCCAACTTTGTATAATAAAGTTGTA
TTAACACTAATTTTTGTTTTATTATGGCAATAATTAATTGCATAAAAGTTAT
GTAAAGTGAGTTTAATTAGGATTAGAGAGATCTTTTAAAGTTTTTCTCTCTT
TTCTCCTTGTTGTAATCCAGTGTATTTAATCAAATCTCAGATGGAGTTCAAA
TTTCGAGATCATGTTTGTTTGTTTTCCAACAAATCTAATTTACAAGAAGAGT
AGATTATTGATTAGTGCTTATAACTCTTTTGCAGTCAAGTTTCTGGATCATA
GACTTATTATATAAGTTATCGTACAAACATACCTTTATATATGTACTTACAG
TACTATTAGTAGCCAACTATCTTAACCCAAATTTTAGCTACCTAAAATATCT
AAAAGGCAACAAATGAAGTAAGATCCATAGTCGATTGATCTAAAGGCAAC
AATTTTCTGGATGCCTACTCGATGGATCTAAAAGGTAACAATGTTCACATTT
TCAAGATTACTTACACTTATGATAATGAGATTAGCACCCAGCTTTCTTGTA
CAAAGTTGGCATTATAAGAAAGCATTGCTTATCAATTTGTTGCAACGAA
CAGGTCACTATCAGTCAAAATAAAATCATTATTTG
AT4G01130ter11 (3′- downstream region; +2176 to +2675; SEQ ID NO: 104)
CAAATAATGATTTTATTTTGACTGATAGTGACCTGTTCGTTGCAACAAA
TTGATGAGCAATGCTTTTTTATAATGCCAACTTTGTATAATAAAGTTGTA
CTTTGTATAAGATCATTAGTTGTTAATTTTTTAAATATGAATTTCTAAACTAT
CCACCAACTAAGCATGTTGTGACAAGCAAAAGTATATAGATAATTAGATAT
TATATGTATATGTTTAAAATTGCGTAATATGCTTTACAGGTCGATTGTTCTC
CTAATCATTTGATTCTTCTTAATTTATTGGATTACGAAATGACATTTCTTTGT
CACCTTTTTCGTGCATATCAGATTTGTTTAAAGTTTACGTGACGAATGACGA
TTGATCTTTTATCTTGTTGTGCCGCCGTATTTTGTATGGACATTACTTGTAAT
ACTATATATATCAGCTATGCGTTAACTATACTCATCAAATACCACATATGAT
TTATTATATCAAAGTACTTATTAATAAATAATTAAATTAACCTTATATTCAA
TTGCACTTGGGTGAGAAAGCCGTTAGAAAAAACTCCCGCTATAGAAGAAAT
GTGGTAGATTTGAACCGAAATTAAATATTTTCACCCAGCTTTCTTGTACAA
AGTTGGCATTATAAGAAAGCATTGCTTATCAATTTGTTGCAACGAACAG
GTCACTATCAGTCAAAATAAAATCATTATTTG
AT5G19240ter12 (3′- downstream region; +854 to +1353; SEQ ID NO: 105)
CAAATAATGATTTTATTTTGACTGATAGTGACCTGTTCGTTGCAACAAA
TTGATGAGCAATGCTTTTTTATAATGCCAACTTTGTATAATAAAGTTGTA
TATGACGTGATTATGGTGAAATTTTTAATAAATTCGTGTGGCAATCAATTAA
AGAGAGAATAACAATATATTAATTGGAGCAAATCGCCTTTCTTATAAAGTT
TCCTCTTACCAAGTGTGTGTGAGTTGAGTAAATAAGAAAACCCTTTTATAAG
CCCGCAAAACCCATACAAACAGGAATGAACCGCCAATGTCCCTAAGAATAT
GGACTCCTAGCAGCTAAACGTGCCTAGTCAAGCCCCGTGGAGCCGCGTAGG
CAGAGAGGGGGAGATAAAAGAGAAGAGGAGAGTGTTGCATGGAATTACAT
TTTAGTTGATTTTTGGAAGGATTTGGTCCACCCTGTCTTCATCAAGTCACAT
ACACCACCAGTTATCATTTTGTATTCATAATTTTAAGAAATTGATCTTTTGTC
TTGATCTGTCTTGCAATGACATATCCTACTGGAGACTTGTATCAGGAAAATT
CAAAATTGCCGGAGAAAATAGTGTTAAGCTTTTTTTCACCCAGCTTTCTTG
TACAAAGTTGGCATTATAAGAAAGCATTGCTTATCAATTTGTTGCAACG
AACAGGTCACTATCAGTCAAAATAAAATCATTATTTG
AT5G58120ter13 (3′- downstream region; +3437 to +3698; SEQ ID NO: 106)
CAAATAATGATTTTATTTTGACTGATAGTGACCTGTTCGTTGCAACAAA
TTGATGAGCAATGCTTTTTTATAATGCCAACTTTGTATAATAAAGTTGTA
AAAGAAAAAGAAAAATGAATCATCAGTCTCTTTTGATCGCTTCATGAGGTT
TTTTATTGTATACGAAACCTTCAGAAAAAATACATGTATCCATGCTTGTTGT
TGACGTCAAAGTTCAGTTCATCAAAAAGATCTTATCTAATGAGAAATGCTTT
TTATAGAAGTGTACCTTAAAACCTTGAATTAAAAAAAACATTGTATTGTGTT
AAGCACAAAAACTGTGGAGGGATACATAATTTGAAGAGCCTCTGATAGTAT
TAACCACCCAGCTTTCTTGTACAAAGTTGGCATTATAAGAAAGCATTGC
TTATCAATTTGTTGCAACGAACAGGTCACTATCAGTCAAAATAAAATCA
TTATTTG
AT3G47340ter14 (3′- downstream region; +3109 to +3608; SEQ ID NO: 107)
CAAATAATGATTTTATTTTGACTGATAGTGACCTGTTCGTTGCAACAAA
TTGATGAGCAATGCTTTTTTATAATGCCAACTTTGTATAATAAAGTTGTA
CTTCGAAGGAGAAATGGATGAAATATGTGTTATATCTTCCCAATGGGTGAA
GTGTTTTGTATGATTTTAAAAATAAGAATGTGATCCTTTTTTTTTCCTATGAA
GATCTGAATGTATAATCTATCTTGTAAAAATTTGTTTCTTTGTAAGATTTGA
ATGTACCGCTTTTACGTAGATCGATGTACATCAATCTTATAAGTTTCAATTA
TGTATTATATTATGTCGATTTGCCAAAAATAAATCTAAAACCTCAAAAATA
AATCTGGTTTTAGATACTTGTATATAGTACTAACTCGATGAAAAAATGATTT
TTTTTTTGTTACTGAATCTGAAATATAATTATAAAATAAAAATACTAATTAT
TAATAAATCAATTTACCAAAAATTTTAAATTTTGATAACAAAAAATTAAAT
CTAGTCAATTTTTAAAAGTTCTTTTTTGATATTTCAAATATCCGAATTCGAA
ATAATTCCAACCGAATTCATAGTCGACTCAAACACACCCAGCTTTCTTGTA
CAAAGTTGGCATTATAAGAAAGCATTGCTTATCAATTTGTTGCAACGAA
CAGGTCACTATCAGTCAAAATAAAATCATTATTTG
Encoding 3xFLAG protein tag (SEQ ID NO: 108)
GATTCATAGTGACTGGATATGTTGTGTTTTACAGTATTATGTAGTCTGTT
TTTTATGCAAAATCTAATTTAATATATTGATATTTATATCATTTTACGTT
TCTCGTTCAACTTTTCTATACAAAGTTGTAATGGACTACAAAGACCATGA
CGGTGATTATAAAGATCATGACATCGATTACAAGGATGACGATGACAAGTG
AACAACTTTGTATAATAAAGTTGAACGAGAAACGTAAAATGATATAAAT
ATCAATATATTAAATTAGATTTTGCATAAAAAACAGACTACATAATACT
GTAAAACACAACATATCCAGTCACTATGAATC
Encoding V5 protein tag (Codon optimized; SEQ ID NO: 109)
GATTCATAGTGACTGGATATGTTGTGTTTTACAGTATTATGTAGTCTGTT
TTTTATGCAAAATCTAATTTAATATATTGATATTTATATCATTTTACGTT
TCTCGTTCAACTTTTCTATACAAAGTTGTAATGGAAGGaAAGCCTATtCCT
AAtCCTCTtCTtGGaCTtGATTCTACtTGAACAACTTTGTATAATAAAGTTGAA
CGAGAAACGTAAAATGATATAAATATCAATATATTAAATTAGATTTTGC
ATAAAAAACAGACTACATAATACTGTAAAACACAACATATCCAGTCACT
ATGAATC
Encoding 3xHA protein tag (Codon optimized; SEQ ID NO: 110)
GATTCATAGTGACTGGATATGTTGTGTTTTACAGTATTATGTAGTCTGTT
TTTTATGCAAAATCTAATTTAATATATTGATATTTATATCATTTTACGTT
TCTCGTTCAACTTTTCTATACAAAGTTGTAATGggacttATTAACATCTTTTA
CCCATACGATGTTCCTgatTATgctggaTACCCATACGATGTTCCTgatTATgctGGA
tctTACCCATACGATGTTCCTgatTATgctGCTCAGTGCtctTAGACAACTTTGTAT
AATAAAGTTGAACGAGAAACGTAAAATGATATAAATATCAATATATTAA
ATTAGATTTTGCATAAAAAACAGACTACATAATACTGTAAAACACAACA
TATCCAGTCACTATGAATC
Encoding 4xcMyc protein tag (Codon optimized; SEQ ID NO: 111)
GATTCATAGTGACTGGATATGTTGTGTTTTACAGTATTATGTAGTCTGTT
TTTTATGCAAAATCTAATTTAATATATTGATATTTATATCATTTTACGTT
TCTCGTTCAACTTTTCTATACAAAGTTGTAATGGAACAAAAGCTtATtTCtG
AGGAAGAtcttAACGGTGAACAAAAGCTtATtTCtGAGGAAGAtcttAACGGActtgat
ggaGAACAAAAGCTtATtTCtGAGGAAGAtcttAACggaGAACAAAAGCTtATtTCtG
AGGAAGAtcttAACGGTtctGCTTAGACAACTTTGTATAATAAAGTTGAACGA
GAAACGTAAAATGATATAAATATCAATATATTAAATTAGATTTTGCATA
AAAAACAGACTACATAATACTGTAAAACACAACATATCCAGTCACTATG
AATC
Encoding AU1 protein tag (SEQ ID NO: 112)
GATTCATAGTGACTGGATATGTTGTGTTTTACAGTATTATGTAGTCTGTT
TTTTATGCAAAATCTAATTTAATATATTGATATTTATATCATTTTACGTT
TCTCGTTCAACTTTTCTATACAAAGTTGTAATGGATACTTATAGATATATT
TGAACAACTTTGTATAATAAAGTTGAACGAGAAACGTAAAATGATATAA
ATATCAATATATTAAATTAGATTTTGCATAAAAAACAGACTACATAATA
CTGTAAAACACAACATATCCAGTCACTATGAATC
Encoding AcV5 protein tag (Codon optimized; SEQ ID NO: 113)
GATTCATAGTGACTGGATATGTTGTGTTTTACAGTATTATGTAGTCTGTT
TTTTATGCAAAATCTAATTTAATATATTGATATTTATATCATTTTACGTT
TCTCGTTCAACTTTTCTATACAAAGTTGTAATGTCTTGGAAAGATgcttctGG
aTGGTCTtgaACAACTTTGTATAATAAAGTTGAACGAGAAACGTAAAATGA
TATAAATATCAATATATTAAATTAGATTTTGCATAAAAAACAGACTACA
TAATACTGTAAAACACAACATATCCAGTCACTATGAATC
Encoding Strep-tagII protein tag (Codon optimized; SEQ ID NO: 114)
GATTCATAGTGACTGGATATGTTGTGTTTTACAGTATTATGTAGTCTGTT
TTTTATGCAAAATCTAATTTAATATATTGATATTTATATCATTTTACGTT
TCTCGTTCAACTTTTCTATACAAAGTTGTAATGGCTGGAtcTACTGGAGCT
TCTTGGTCTCATCCTCAATTTGAAAAGGGAGGAGGTTCTGGAGGTGGATCT
GGTGGAGGATCATGGTCTCATCCACAGTTCGAAAAGGGAGCTGGATCTAGG
CCTATTTGAACAACTTTGTATAATAAAGTTGAACGAGAAACGTAAAATG
ATATAAATATCAATATATTAAATTAGATTTTGCATAAAAAACAGACTAC
ATAATACTGTAAAACACAACATATCCAGTCACTATGAATC
Encoding 6xHis protein tag (Codon optimized; SEQ ID NO: 115)
GATTCATAGTGACTGGATATGTTGTGTTTTACAGTATTATGTAGTCTGTT
TTTTATGCAAAATCTAATTTAATATATTGATATTTATATCATTTTACGTT
TCTCGTTCAACTTTTCTATACAAAGTTGTAATGtctCATCATCATCATCATC
ATGCTTAGACAACTTTGTATAATAAAGTTGAACGAGAAACGTAAAATGA
TATAAATATCAATATATTAAATTAGATTTTGCATAAAAAACAGACTACA
TAATACTGTAAAACACAACATATCCAGTCACTATGAATC
Encoding T7 protein tag (Codon optimized; SEQ ID NO: 116)
GATTCATAGTGACTGGATATGTTGTGTTTTACAGTATTATGTAGTCTGTT
TTTTATGCAAAATCTAATTTAATATATTGATATTTATATCATTTTACGTT
TCTCGTTCAACTTTTCTATACAAAGTTGTAATGGCTtctATGACTGGTGGAC
AGCAAATGGGTGCTTAGACAACTTTGTATAATAAAGTTGAACGAGAAAC
GTAAAATGATATAAATATCAATATATTAAATTAGATTTTGCATAAAAAA
CAGACTACATAATACTGTAAAACACAACATATCCAGTCACTATGAATC

### Expression Analysis by Histochemical GUS Staining in the Transgenic T₁ Arabidopsis

[0205] Arabidopsis thaliana (Col-0) was grown in a growth chamber under 12 h/12 h (light, 135 μmol m⁻² s⁻¹/dark) cycles at 23° C./21° C. (day/night). The constructs of AT3G59350pro1::GUS/LUC, AT4G32340pro2::GUS/LUC, AT5G23240pro3::GUS/LUC, AT5G44050pro4::GUS/LUC, AT4G04330pro5::GUS/LUC, AT4G23290pro6::GUS/LUC, AT1G07180pro7::GUS/LUC, AT1G65490pro8::GUS/LUC, AT1G21670pro9::GUS/LUC, AT2G17450pro10::GUS/LUC, AT4G01130pro11::GUS/LUC, AT5G19240pro12::GUS/LUC, AT5G58120pro13::GUS/LUC, and AT3G47340pro14::GUS/LUC were introduced into Agrobacterium tumefaciens GV3101 and 4-week-old plants were transformed using the Agrobactrium-mediated floral dipping method (Zhang et al, 2006, Nature Protocol 1: 641-646). Seeds were harvested and screened on ½ Murashige and Skoog (MS) medium containing 50 μg mL⁻¹ kanamycin. Surviving transgenic plants were transferred to new ½ MS medium and soil and were grown for 30 and 60 days, respectively. Both the soil- or MS medium-grown transgenic T₁ plants were used to analyze tissue-specific expression by histochemical staining of GUS activity in the different stages of Arabidopsis growth and development.

[0206] Histochemical GUS assays were based upon methods described in Jefferson et al. (EMBO J. 6: 3901-3907, 1987) with the following modifications. Plant tissues were submerged in 1 mg ml⁻¹ X-GlucA solution (5-bromo-4-chloro-3-indolyl glucuronide, X871, Phyto Technology Lab. Overland Park, Kans., USA) in 50 mM sodium phosphate buffer [(pH 7.0), 4 mM EDTA, 1 mM K₄Fe(CN)₆, 1 mM K₃Fe(CN)₆, and 0.1% Triton X-100] and vacuum infiltrated for 20 mM and then incubated overnight at 37° C. in the dark. Tissue was dehydrated in a series of increasing concentrations of ethanol (70%, 80%, 90%, and 95% v/v) over 2 days. Images were photographed using a zoom stereomicroscope (SMZ800, Nikon Instruments Inc., Melville, N.Y., USA).

### Construction of Position, Adaptor, and Carrier Vectors

[0207] For every position vector (also referred to as position binary vector), the gypsy barrier insulator (396 bp) with SbfI and XbaI was synthesized by DNA 2.0 and used for preventing heterochromatin-mediated gene silencing and interference between adjacent transcription units (She et al., 2010, Genetics 185: 1141-1150). One copy of the predigested gypsy insulator was cloned into the SbfI and XbaI sites of pGWB401 vector (Nakagawa et al., 2007, Bioscience Biotechnology, and Biochemistry 71: 2095-2100), named pGWB401 plus gypsy-F. Then, the gypsy insulator was amplified by polymerase chain reaction (PCR) to generate a product with a 5′ AscI and terminating with a 3′ SacI site. The reverse complement sequence of the gypsy insulator was replaced with the Nopaline synthase (Nos) terminator between SacI and AscI sites in the pGWB401 plus gypsy-F vector. The resulting plasmid contained two copies of gypsy barrier insulator oriented in different directions and named pGWB401 plus gypsy.

[0208] For reliable construction of large gene circuits, homing enzyme I-sceI (Mour et al., 2003, Journal of Molecular Biology 334: 685-695), Multisite Gateway (Invitrogen, Carlsbad, Calif., USA), and Gibson isothermal assembly (Gibson et al., 2009, Nature Methods 6: 343-345) methods were used as described in detail by Guye et al. (Nucleic Acids Research 41: e1562013). To insert homing enzyme I-sceI and unique sequences (UNS) at the 3′-downstream of reverse complementary gypsy insulator in the pGWB401 plus gypsy vector, multiple cloning sites of AscI, PacI, AseI, KpnI, SpeI, and AscI were generated. Two complementary oligonucleotides were incubated in the annealing buffer (10 mM Tris, pH7.5, 50 mM NaCl, and 1 mM EDTA) using the thermocycler at 95° C. for 2 mM and then gradually cool to 25° C. for 45 mM. Both the double-strand oligonucleotides containing the multiple cloning sites and the pGWB401 plus gypsy were digested by AscI restriction enzyme. Then, the linearized pGWB401 plus gypsy DNA fragment was dephosphorylated by alkaline phosphatase, calf intestinal (CIP, M0290, NEB, Ipswich, Mass., USA) and ligated with the predigested oligonucleotides containing the multiple cloning sites. Next, synthesized DNA sequences of I-sceI-UNS 1 to 11 were cloned using HindIII and SfbI sites, which are positioned at the 5′-upstream region of the gypsy insulator in the pGWB401 plus gypsy vector. After DNA sequencing verification of the I-sceI-UNS 1 to 11 inserts at 5′-upstream region of the pGWB401 plus gypsy vector, the other synthesized DNA sequences of I-sceI-UNS 2 to 12 were inserted in the 3′-downstream region of the reverse complement sequence of gypsy insulator using KpnI and SpeI sites. All synthesized DNA sequences of the UNS sequences are presented in Tables 1-5 below.

TABLE 1
A list of synthesized DNA sequences positioned
in 5′-upstream region of position binary vectors

| | | | I-sceI (reverese | | Unique sequences | | | SEQ |
|---|---|---|---|---|---|---|---|---|
| Name | | HindIII | complement) | | (1 to 11) | SbfI | | ID NO. |
| I-sceI- | 5′- | AAGCTT | ATTACCCTGTTATCCCTA | ACC | GGTTTACCGAGCTCTTATTGGTT | CCTGCAGG | -3′ | 10 |
| UNS1_upstream | | | | | TTCAAACTTCATTGACTGTGCC | | | |
| I-sceI- | 5′- | AAGCTT | ATTACCCTGTTATCCCTA | ACC | GGTGCGTTTTTATGCTTGTAGTA | CCTGCAGG | -3′ | 11 |
| UNS2_upstream | | | | | TTGTATAATGTTTTTAAGATCC | | | |
| I-sceI- | 5′- | AAGCTT | ATTACCCTGTTATCCCTA | ACC | GGTCTAATACCCAATCTCTCGTC | CCTGCAGG | -3′ | 12 |
| UNS3_upstream | | | | | TTATCCAGATGTTTTATACGCC | | | |
| I-sceI- | 5′- | AAGCTT | ATTACCCTGTTATCCCTA | ACC | GGTGAATTCCCTTATGTGAGTGT | CCTGCAGG | -3′ | 13 |
| UNS4_upstream | | | | | AAAAGGCAGGCGAGTTTGTCCC | | | |
| I-sceI- | 5′- | AAGCTT | ATTACCCTGTTATCCCTA | ACC | GGTTGCTTGCAAAAGCAGTAATT | CCTGCAGG | -3′ | 14 |
| UNS5_upstream | | | | | GGAAAGCACTCTCAAAGAATCC | | | |
| I-sceI- | 5′- | AAGCTT | ATTACCCTGTTATCCCTA | ACC | GGTAGATAAGTTGATTTAGCCAT | CCTGCAGG | -3′ | 117 |
| UNS6_upstream | | | | | AAAATATTGTTTCCGTGACCCC | | | |
| I-sceI- | 5′- | AAGCTT | ATTACCCTGTTATCCCTA | ACC | GGTTCTGAGTCACGGCTTCATTG | CCTGCAGG | -3′ | 118 |
| UNS7_upstream | | | | | GCATTCCGTACAACGAACGTCC | | | |
| I-sceI- | 5′- | AAGCTT | ATTACCCTGTTATCCCTA | ACC | GGTCCTCAGAGAGCCTATAGCGG | CCTGCAGG | -3′ | 119 |
| UNS8_upstream | | | | | TAAAACAACACCATGCATCCCC | | | |
| I-sceI- | 5′- | AAGCTT | ATTACCCTGTTATCCCTA | ACC | GGTCGCAGTCGCTTCCTGTAAAT | CCTGCAGG | -3′ | 120 |
| UNS9_upstream | | | | | AGAGCATTAAATTCCATAGTCC | | | |
| I-sceI- | 5′- | AAGCTT | ATTACCCTGTTATCCCTA | ACC | GGTACTTAATCGAAAAAAAAACA | CCTGCAGG | -3′ | 121 |
| UNS10_upstream | | | | | GACAGCCATGTGCTCTTCGGCC | | | |
| I-sceI- | 5′- | AAGCTT | ATTACCCTGTTATCCCTA | ACC | GGTGGACATGATTATGGAACACA | CCTGCAGG | -3′ | 122 |
| UNS11_upstream | | | | | CACACGCTAGCCGCCCAGTTCC | | | |

TABLE 2
A list of synthesized DNA sequences positioned
in 3′-downstream region of position vectors

| | | | Unique sequences | | | | | SEQ |
|---|---|---|---|---|---|---|---|---|
| Name | | KpnI | (2 to 12) | PacI | I-sceI | SpeI | | ID NO: |
| I-sceI- | 5′- | GGTACC | GGTGCGTTTTTATGCTTGTAGTA | TTAATTAA | TAGGGATAACAGGGTAAT | ACTAGT | -3′ | 123 |
| UNS2_downstream | | | TTGTATAATGTTTTTAAGATCC | | | | | |
| I-sceI- | 5′- | GGTACC | GGTCTAATACCCAATCTCTCGTC | TTAATTAA | TAGGGATAACAGGGTAAT | ACTAGT | -3′ | 124 |
| UNS3_downstream | | | TTATCCAGATGTTTTATACGCC | | | | | |
| I-sceI- | 5′- | GGTACC | GGTGAATTCCCTTATGTGAGTGT | TTAATTAA | TAGGGATAACAGGGTAAT | ACTAGT | -3′ | 125 |
| UNS4_downstream | | | AAAAGGCAGGCGAGTTTGTCCC | | | | | |
| I-sceI- | 5′- | GGTACC | GGTTGCTTGCAAAAGCAGTAATT | TTAATTAA | TAGGGATAACAGGGTAAT | ACTAGT | -3′ | 126 |
| UNS5_downstream | | | GGAAAGCACTCTCAAAGAATCC | | | | | |
| I-sceI- | 5′- | GGTACC | GGTAGATAAGTTGATTTAGCCAT | TTAATTAA | TAGGGATAACAGGGTAAT | ACTAGT | -3′ | 127 |
| UNS6_downstream | | | AAAATATTGTTTCCGTGACCCC | | | | | |
| I-sceI- | 5′- | GGTACC | GGTTCTGAGTCACGGCTTCATTG | TTAATTAA | TAGGGATAACAGGGTAAT | ACTAGT | -3′ | 128 |
| UNS7_downstream | | | GCATTCCGTACAACGAACGTCC | | | | | |
| I-sceI- | 5′- | GGTACC | GGTCCTCAGAGAGCCTATAGCGG | TTAATTAA | TAGGGATAACAGGGTAAT | ACTAGT | -3′ | 129 |
| UNS8_downstream | | | TAAAACAACACCATGCATCCCC | | | | | |
| I-sceI- | 5′- | GGTACC | GGTCGCAGTCGCTTCCTGTAAAT | TTAATTAA | TAGGGATAACAGGGTAAT | ACTAGT | -3′ | 130 |
| UNS9_downstream | | | AGAGCATTAAATTCCATAGTCC | | | | | |
| I-sceI- | 5′- | GGTACC | GGTACTTAATCGAAAAAAAAACA | TTAATTAA | TAGGGATAACAGGGTAAT | ACTAGT | -3′ | 131 |
| UNS10_downstream | | | GACAGCCATGTGCTCTTCGGCC | | | | | |
| I-sceI- | 5′- | GGTACC | GGTGGACATGATTATGGAACACA | TTAATTAA | TAGGGATAACAGGGTAAT | ACTAGT | -3′ | 132 |
| UNS11_downstream | | | CACACGCTAGCCGCCCAGTTCC | | | | | |
| I-sceI- | 5′- | GGTACC | GGTGAGCCCAAACAGCGAAATAC | TTAATTAA | TAGGGATAACAGGGTAAT | ACTAGT | -3′ | 133 |
| UNS12_downstream | | | CTGAGCGAACAAATACTACTCC | | | | | |

TABLE 3
A list of synthesized DNA sequences
positioned in 5′-upstream region of adaptor vectors

| | | Unique sequences | | Unique | | | SEQ |
|---|---|---|---|---|---|---|---|
| Name | HindIII | (2 to 12) | PacI | sequences 2 | I-sceI | SacI | ID NO |
| UNS2-UNS2- | AAG | GGTGCGTTTTTATGCTTGTAGTA | TTAATTAA | GGTGCGTTTTTATGCTTGTA | TAGGGATAA | GAGCTC | 134 |
| IsceI_upstream | CTT | TTGTATAATGTTTTTAAGATCC | | GTATTGTATAATGTTTTTAA | CAGGGTAAT | | |
| | | | | GATCC | | | |
| UNS3-UNS2- | AAG | GGTCTAATACCCAATCTCTCGTC | TTAATTAA | GGTGCGTTTTTATGCTTGTA | TAGGGATAA | GAGCTC | 135 |
| IsceI_upstream | CTT | TTATCCAGATGTTTTATACGCC | | GTATTGTATAATGTTTTTAA | CAGGGTAAT | | |
| | | | | GATCC | | | |
| UNS4-UNS2- | AAG | GGTGAATTCCCTTATGTGAGTGT | TTAATTAA | GGTGCGTTTTTATGCTTGTA | TAGGGATAA | GAGCTC | 136 |
| IsceI_upstream | CTT | AAAAGGCAGGCGAGTTTGTCCC | | GTATTGTATAATGTTTTTAA | CAGGGTAAT | | |
| | | | | GATCC | | | |
| UNS5-UNS2- | AAG | GGTTGCTTGCAAAAGCAGTAATT | TTAATTAA | GGTGCGTTTTTATGCTTGTA | TAGGGATAA | GAGCTC | 137 |
| IsceI_upstream | CTT | GGAAAGCACTCTCAAAGAATCC | | GTATTGTATAATGTTTTTAA | CAGGGTAAT | | |
| | | | | GATCC | | | |
| UNS6-UNS2- | AAG | GGTAGATAAGTTGATTTAGCCAT | TTAATTAA | GGTGCGTTTTTATGCTTGTA | TAGGGATAA | GAGCTC | 138 |
| IsceI_upstream | CTT | AAAATATTGTTTCCGTGACCCC | | GTATTGTATAATGTTTTTAA | CAGGGTAAT | | |
| | | | | GATCC | | | |
| UNS7-UNS2- | AAG | GGTTCTGAGTCACGGCTTCATTG | TTAATTAA | GGTGCGTTTTTATGCTTGTA | TAGGGATAA | GAGCTC | 139 |
| IsceI_upstream | CTT | GCATTCCGTACAACGAACGTCC | | GTATTGTATAATGTTTTTAA | CAGGGTAAT | | |
| | | | | GATCC | | | |
| UNS8-UNS2- | AAG | GGTCCTCAGAGAGCCTATAGCGG | TTAATTAA | GGTGCGTTTTTATGCTTGTA | TAGGGATAA | GAGCTC | 140 |
| IsceI_upstream | CTT | TAAAACAACACCATGCATCCCC | | GTATTGTATAATGTTTTTAA | CAGGGTAAT | | |
| | | | | GATCC | | | |
| UNS9-UNS2- | AAG | GGTCGCAGTCGCTTCCTGTAAAT | TTAATTAA | GGTGCGTTTTTATGCTTGTA | TAGGGATAA | GAGCTC | 141 |
| IsceI_upstream | CTT | AGAGCATTAAATTCCATAGTCC | | GTATTGTATAATGTTTTTAA | CAGGGTAAT | | |
| | | | | GATCC | | | |
| UNS10-UNS2- | AAG | GGTACTTAATCGAAAAAAAAACA | TTAATTAA | GGTGCGTTTTTATGCTTGTA | TAGGGATAA | GAGCTC | 142 |
| IsceI_upstream | CTT | GACAGCCATGTGCTCTTCGGCC | | GTATTGTATAATGTTTTTAA | CAGGGTAAT | | |
| | | | | GATCC | | | |
| UNS11-UNS2- | AAG | GGTGGACATGATTATGGAACACA | TTAATTAA | GGTGCGTTTTTATGCTTGTA | TAGGGATAA | GAGCTC | 143 |
| IsceI_upstream | CTT | CACACGCTAGCCGCCCAGTTCC | | GTATTGTATAATGTTTTTAA | CAGGGTAAT | | |
| | | | | GATCC | | | |
| UNS12-UNS2- | AAG | GGTGAGCCCAAACAGCGAAATAC | TTAATTAA | GGTGCGTTTTTATGCTTGTA | TAGGGATAA | GAGCTC | 144 |
| IsceI_upstream | CTT | CTGAGCGAACAAATACTACTCC | | GTATTGTATAATGTTTTTAA | CAGGGTAAT | | |
| | | | | GATCC | | | |

TABLE 4
A synthesized DNA sequences positioned
in 3′-downstream region of adaptor vectors

| | | | | SEQ |
|---|---|---|---|---|
| Name | NotI | Unique sequence X | XbaI | ID NO. |
| UNSx | GCGGCCGC | GGTGCGTTTTTATGCTT | TCTAGA | 145 |
| | | GTAGTATTGTATAATGT | | |
| | | TTTTAAGATCC | | |

TABLE 5
A synthesized DNA sequences
positioned in carrier vector

| | | | Unique | | Unique | | SEQ |
|---|---|---|---|---|---|---|---|
| Name | HindIII | I-sceI | sequence 1 | PacI | sequence X | EcoRI | ID NO. |
| I-sceI-UNS1- | AAGCTT | TAGGGA | GGTTTACCGAGC | TTAA | GGTATCACTAGT | GAATT | 146 |
| PacI-UNSx | | TAACAG | TCTTATTGGTTT | TTAA | ATTACAGAGGTA | C | |
| | | GGTAAT | TCAAACTTCATT | | AGTTATAACAGT | | |
| | | | GACTGTGCC | | CGCCTAACC | | |

[0209] For the creation of the 33 adaptor vectors containing kanamycin, hygromycin, or BASTA resistance cassettes, the kanamycin resistance cassette was retrieved from pGWB401 vector by EcoRI digestion and hygromycin and BASTA resistance cassettes were PCR-amplified using the hygromycin and the BASTA specific primer pairs. Two plasmids of pGWB501 (Nakagawa et al., 2007, Bioscience Biotechnology, and Biochemistry 71: 2095-2100) and pCAMBIA3301 (see cambia.org/daisy/cambia/home.html) were used as DNA templates to amplify both the hygromycin and BASTA cassettes, respectively. Predigested kanamycin cassette (1,763 bp) and the TOPO vector backbone (3,501 bp) were recombined with each other using T4 DNA ligase (Takara Bio Inc., Otsu, Shiga, Japan). Each of PCR-amplified hygromycin (2,255 bp) and BASTA (1,684 bp) cassettes was digested by SpeI and NotI restriction enzyme sites and ligated with the TOPO vector, respectively.

[0210] Next, synthesized DNA sequence of NotI-UNSx-XbaI was inserted at 3′-downstream region of the plant selectable marker using NotI and XbaI sites and then, 11 DNA sequences of HindIII-UNS (2 to 12)-PacI-UNS2-I-sceI-SacI were cloned at the 5′-upstream region of the plant selectable marker using HindIII and XbaI sites. A total of 33 adaptor vectors containing the three different plant selectable markers and UNSes such that the Adaptor-Kan (2 to 12), Adaptor-Hyg (2 to 12), and Adaptor-BASTA (2 to 12) were constructed to link between position binary vectors and a carrier vector via Gibson isothermal assembly.

[0211] For a carrier vector, the pGWB401 vector was digested using HindIII and EcoRI to remove the DNA fragment of attR1-CAT-ccdB-attR2-kanamycin resistance cassette (3,974 bp) and the DNA sequence of HindIII-I-sceI-UNS1-PacI-UNSx-EcoRI was inserted into the predigested pGWB401 vector. Inserted sequences including I-sceI, UNSes, and gypsy insulator in the 11 position binary vectors, 33 adaptor vectors and, 1 carrier vector were verified by DNA sequencing (Nevada Genomics Center, Reno, Nev., USA). All sequences of position binary vectors, adaptor vectors, and carrier vector are presented in SEQ ID NOS: 15-59.

### Part Vector of CAM Genes and Promoters

[0212] To construct the part vectors of CAM genes and promoters, the Gateway BP reaction was performed according to the manufacturer's protocol (Invitrogen, Carlsbad, Calif., USA). The full-length coding sequences of nine CAM genes were amplified with attB5 site in the forward primers and attB4 site in the reverse primers (Tables 6 and 7).

TABLE 6
A list of primers for CAM
gene cloning in ice plant

| Name | Forward primer | Reverse primer |
|---|---|---|
| (SEQ ID NO.) | (5′ to 3′) | (5′ to 3′) |
| McBca2 | ATGACAGGAGGCTT | TTATACTGCGGTAG |
| (147 and 148) | TAGGAAATG | AAGGTGAGAG |
| McPpc1 | ATGTCGACTGTGAA | CTAACCAGTGTTCT |
| (149 and 150) | GCTAGATAGG | GCAGACCA |
| McPpck | ATGTGTGAGAGCTT | TTACATGTTGGCCA |
| (151 and 152) | CAAGAGAGAA | ATCCTC |
| McNAD-Mdh2 | ATGGCCGTTGAACC | TTAAGTCAGGCATG |
| (153 and 154) | TCTTC | AGTAGGCC |
| McNADP-ME3 | ATGGGTGGTAGCAA | TCAACGGAAACTCC |
| (155 and 156) | TGCATT | GGTAAG |
| McPpdk1 | ATGGCGTCAGCTTT | TCAAACGACTTGAG |
| (157 and 158) | CAAGG | CTGCTG |
| McPpdk-RP | ATGTTAGCTTGTGC | CTAATAGCGCTTAG |
| (159 and 160) | TAGCCTCG | ATATTCTGGGC |
| McALMT4 | ATGGCGGGGAAATT | ATTTCTGAACTGAA |
| (161 and 162) | CGGATCACTGA | GGGACACCATCAAC |
| MctDT | ATGAATCATAATCA | TCATGTATATCCCG |
| (163 and 164) | CGATCCCAA | AATTTGAATACA |

TABLE 7
A list of primers for CAM gene circuit

| Name (SEQ ID NO) | Primer sequence (5′ to 3′) |
|---|---|
| McBca2-attB5- | GGGGACAACTTTGTATACAAAAGTTG |
| Fwd (165) | TAATGACAGGAGGCTTTAGGAAATGC |
| | A |
| McBca2-attB4- | GGGGACAACTTTGTATAGAAAAGTTG |
| Rev (166) | GGTTTACTGCGGTAGAAGGTGAGAGG |
| | CCA |
| McPpc1-attB5- | GGGGACAACTTTGTATACAAAAGTTG |
| Fwd (167) | TAATGTCGACTGTGAAGCTAGATAGG |
| | C |
| McPpc1-attB4- | GGGGACAACTTTGTATAGAAAAGTTG |
| Rev (168) | GGTTACCAGTGTTCTGCAGACCAGCA |
| | GCA |
| McPpck-attB5- | GGGGACAACTTTGTATACAAAAGTTG |
| Fwd (169) | TAATGTGTGAGAGCTTCAAGAGAGAA |
| | T |
| McPpck-attB4- | GGGGACAACTTTGTATAGAAAAGTTG |
| Rev (170) | GGTTCATGTTGGCCAATCCTCCACTG |
| | GTT |
| McNAD-Mdh2-attB5- | GGGGACAACTTTGTATACAAAAGTTG |
| Fwd (171) | TAATGGCCGTTGAACCTCTTCGCGTT |
| | C |
| McNAD-Mdh2-attB4- | GGGGACAACTTTGTATAGAAAAGTTG |
| Rev (172) | GGTTAGTCAGGCATGAGTAGGCCAAT |
| | GTC |
| McNADP-ME3-attB5- | GGGGACAACTTTGTATACAAAAGTTG |
| Fwd (173) | TAATGGGTGGTAGCAATGCATTGAAT |
| | G |
| McNADP-ME3-attB4- | GGGGACAACTTTGTATAGAAAAGTTG |
| Rev (174) | GGTTACGGAAACTCCGGTAAGTAGGG |
| | TTG |
| McPpdk1-attB5- | GGGGACAACTTTGTATACAAAAGTTG |
| Fwd (175) | TAATGGCGTCAGCTTTCAAGGGGATC |
| | T |
| McPpdk1-attB4- | GGGGACAACTTTGTATAGAAAAGTTG |
| Rev (176) | GGTTAACGACTTGAGCTGCTGCCAGC |
| | CTT |
| McPpdk-RP-attB5- | GGGGACAACTTTGTATACAAAAGTTG |
| Fwd (177) | TAATGTTAGCTTGTGCTAGCCTCGGC |
| | C |
| McPpdk-RP-attB4- | GGGGACAACTTTGTATAGAAAAGTTG |
| Rev (178) | GGTTATAGCGCTTAGATATTCTGGGC |
| | ATC |
| McALMT4-attB5- | GGGGACAACTTTGTATACAAAAGTTG |
| Fwd (179) | TAATGGCGGGGAAATTCGGATCACTG |
| | A |
| McALMT4-attB4- | GGGGACAACTTTGTATAGAAAAGTTG |
| Rev (180) | GGTTATTTCTGAACTGAAGGGACACC |
| | ATC |
| MctDT-attB5- | GGGGACAACTTTGTATACAAAAGTTG |
| Fwd (181) | TAATGAATCATAATCACGATCCCAAA |
| | A |
| MctDT-attB4- | GGGGACAACTTTGTATAGAAAAGTTG |
| Rev (182) | GGTTTGTATATCCCGAATTTGAATAC |
| | AAA |
| AT3G59350pro1-attB1- | GGGGACAAGTTTGTACAAAAAAGCAG |
| Fwd (183) | GCTTAGATTTCTATCAATGAAAGTAG |
| | ACGT |
| AT3G59350pro1-attB5r- | GGGGACAACTTTTGTATACAAAGTTG |
| Rev (184) | TAGTGAAAGACGGATCGAATAAATTT |
| AT4G32340pro2-attB1- | GGGGACAAGTTTGTACAAAAAAGCAG |
| Fwd (185) | GCTTATTCATTAAAAAAATATTTTTA |
| | TACT |
| AT4G32340pro2-attB5r- | GGGGACAACTTTTGTATACAAAGTTG |
| Rev (186) | TTGTTAGTTCTTGTGGGGAATATTTC |
| AT5G23240pro3-attB1- | GGGGACAAGTTTGTACAAAAAAGCAG |
| Fwd (187) | GCTTACTGAAATTTAGTAGAGAAAAA |
| | TATA |
| AT5G23240pro3-attB5r- | GGGGACAACTTTTGTATACAAAGTTG |
| Rev (188) | TATTTTCCCCTTCTCTGTTTTGGAAG |
| AT5G44050pro4-attB1- | GGGGACAAGTTTGTACAAAAAAGCAG |
| Fwd (189) | GCTTACTCTTTCTAATTTCAGGTTAT |
| | AATT |
| AT5G44050pro4-attB5r- | GGGGACAACTTTTGTATACAAAGTTG |
| Rev (190) | TCGCCGATCTTCAGTAAATTAACAAT |
| AT4G04330pro5-attB1- | GGGGACAAGTTTGTACAAAAAAGCAG |
| Fwd (191) | GCTTATTTTAAATATCTGTATTTTGC |
| | CTCC |
| AT4G04330pro5-attB5r- | GGGGACAACTTTTGTATACAAAGTTG |
| Rev (192) | TAGAAATATTGGATGAAGAAAAATTG |
| AT4G23290pro6-attB1- | GGGGACAAGTTTGTACAAAAAAGCAG |
| Fwd (193) | GCTTAGAACAGATAAGTGAAGTTTCT |
| | CTGC |
| AT4G23290pro6-attB5r- | GGGGACAACTTTTGTATACAAAGTTG |
| Rev (194) | TCGAGTTTGATTTTCTTGTTTAAAAC |
| AT1G07180pro7-attB1- | GGGGACAAGTTTGTACAAAAAAGCAG |
| Fwd (195) | GCTTATTAATAAATTAGTAATGAACA |
| | CCTA |
| AT1G07180pro7-attB5r- | GGGGACAACTTTTGTATACAAAGTTG |
| Rev (196) | TGATTCTTTAGGTACTCTTCTTCAAT |
| AT1G65490pro8-attB1- | GGGGACAAGTTTGTACAAAAAAGCAG |
| Fwd (197) | GCTTAACCGCTTAATATCGTATGATT |
| | AGTA |
| AT1G65490pro8-attB5r- | GGGGACAACTTTTGTATACAAAGTTG |
| Rev (198) | TTTCGTTCTTCGTTGCGTTTTTGGTC |
| AT1G21670pro9-attB1- | GGGGACAAGTTTGTACAAAAAAGCAG |
| Fwd (199) | GCTTAAGCTTATAGCGTAGAGATGAT |
| | TCAC |
| AT1G21670pro9-attB5r- | GGGGACAACTTTTGTATACAAAGTTG |
| Rev (200) | TGGTGGACTCTTGTTTTGGGACTTGA |
| AT2G17450pro10-attB1- | GGGGACAAGTTTGTACAAAAAAGCAG |
| Fwd (201) | GCTTAAGTAAAGAGAATGATTATTGA |
| | GAAT |
| AT2G17450pro10-attB5r- | GGGGACAACTTTTGTATACAAAGTTG |
| Rev (202) | TTGCTTTTTGAGCTTTGGAGACTTTT |
| AT4G01130pro11-attB1- | GGGGACAAGTTTGTACAAAAAAGCAG |
| Fwd (203) | GCTTAAAAGAAGAGAGAGGAAGGAGA |
| | AGAG |
| AT4G01130pro11-attB5r- | GGGGACAACTTTTGTATACAAAGTTG |
| Rev (204) | TGTCTATCTCTGTGTGAACAAAATGT |
| AT5G19240pro12-attB1- | GGGGACAAGTTTGTACAAAAAAGCAG |
| Fwd (205) | GCTTAAAGTCATACAACATCAGTTTT |
| | TGTT |
| AT5G19240pro12-attB5r- | GGGGACAACTTTTGTATACAAAGTTG |
| Rev (206) | TTGATGCAGAGGCACTTTTAGCTTTA |
| AT5G58120pro13-attB1- | GGGGACAAGTTTGTACAAAAAAGCAG |
| Fwd (207) | GCTTAAAGTGTAGATTATTACAAGTA |
| | TATA |
| AT5G58120pro13-attB5r- | GGGGACAACTTTTGTATACAAAGTTG |
| Rev (208) | TGGGGAAGAATCTTGAGTGGTTTAAA |
| AT3G47340pro14-attB1- | GGGGACAAGTTTGTACAAAAAAGCAG |
| Fwd (209) | GCTTAATTTCAATCATTTATAGCTGA |
| | AGGT |
| AT3G47340pro14-attB5r- | GGGGACAACTTTTGTATACAAAGTTG |
| Rev (210) | TGTTTTTTTTTTGAAGAAAGTGAAAA |

[0213] The attB5 and attB5-flanked PCR products were purified and mixed with pDONR™ 221 P5-P4 and BP clonase II for 3 hours. For part vectors of promoters, AT3G59350pro1, AT1G65490pro8, AT5G23240pro3, AT4G01130pro11, AT5G44050pro4, AT1G07180pro7, AT1G21670pro9, AT4G23290pro6, and AT4G04330pro5 were PCR-amplified with an attB1 site in the forward primers and an attB5r site in the reverse primers and the purified PCR products were introduced into pDONR™ 221 P1-P5r by Gateway BP reaction. Recombinant part vectors of CAM genes and promoters were transformed into E. coli competent cells and verified by DNA sequencing (Nevada Genomics Center, Reno, Nev., USA).

### Construction of CAM Gene Cassettes

[0214] Gateway LR reactions were performed according to the manufacturer's protocol (Invitrogen, Carlsbad, Calif., USA). Briefly, 5 fmol of each of part vectors containing gene, promoter, and protein tag were mixed with position binary vector and incubated in LR Clonase II Plus enzyme mix at 25° C. for 16 h. The reaction mixture was transformed into E. coli competent cells and each of the position binary vectors containing different CAM gene cassettes was verified by DNA sequencing (Nevada Genomics Center, Reno, Nev., USA). The sequences of position binary vectors containing each CAM gene cassette are presented as SEQ ID NOs: 60-68.

### Construction CAM Gene Circuit

[0215] Nine position binary vectors containing each of the CAM gene cassette were digested in I-sceI (R0694, NEB Biolabs, MA, USA) restriction enzyme mix at 37° C. for 6 hours. Subsequently, the Adaptor-Hyg (no. 10) was digested by HindIII and XbaI and the carrier vector was digested by PacI. A total of nine CAM gene cassettes and predigested-adaptor vector and -carrier vector were purified using the QIAquick gel extraction kit and Gibson assembly using a Gibson Assembly® Ultra kit (SGI-DNA, La Jolla, Calif., USA) was performed according to the manufacturer's protocol. Recombinant CAM gene cassettes were used as the DNA template and the full-length coding sequences of 9 CAM genes were amplified by PCR to verify their proper assembly. The DNA sequence of the CAM gene circuit containing 9 gene cassettes is presented as SEQ ID NO: 69.

### Example 2

### Methods of Increasing CAM Activity

[0216] FIG. 2A illustrates mRNA expression patterns of selected core CAM genes in Mesembryanthemum crystallinum. The biochemical reactions for CAM are present in the mesophyll cells of all vascular plant species; however, only selected genes within these multi-gene families become recruited to carry out the enzymatic and transport functions required for CAM. To identify specific isogenes, RNA-sequencing (RNA-seq) was conducted in triplicate to define which genes were participating in CAM in the facultative CAM species Mesembryanthemum crystallinum under well-watered and water-deficit stress conditions. The averaged FPKM (fragments per kb of exon per million fragments mapped) values of three biological replicates were calculated from TMM (trimmed mean of M-values) normalized RNA-seq data. In summary, four genes of the carboxylation module (McBca2, McPpc1, McPpck, and McNAD-Mdh2), three genes of the decarboxylation module (McNADP-ME3, McPpdk1, and McPpdk-RP), and two genes encoding malate transport functions (McALMT4 and MctDT) were selected for initial CAM biodesign functional testing.

[0217] FIG. 2B illustrates subcellular localizations of selected core ice plant CAM genes in Arabidopsis. To identify subcellular localizations of ice plant CAM genes in Arabidopsis, semi-quantitative RT-PCR (reverse transcription polymerase chain reaction) was conducted and each full-length CDS (coding sequences) of candidate CAM genes was cloned into impGWB405 binary vector as protein fusions containing C-terminus sGFP). Agrobacterium harboring each vector (35S::McBca2-sGFP, 35S::McPpck-sGFP, 35S::McPpc1-sGFP, 35S::McNAD-Mdh2-sGFP, 35S::McNADP-ME3-sGFP, 35S::McPpdk1-sGFP, 35S::McPPDK-RP-sGFP, 35S::McAlmt4-sGFP, and 35S::MctDT-sGFP) was transformed into Arabidopsis and subcellular localization was determined by confocal microscopy. In summary, three fusion proteins (McBCA2-sGFP, McNAD-MDH2-sGFP, and McNADP-ME3-sGFP) were localized to the cytosol, two fusion proteins (McPPPCK-sGFP and McPPC1-sGFP) were localized to both the cytosol and the chloroplast, two fusion proteins (McPPDK1-sGFP and McPPDK-RP-sGFP) were localized to the chloroplast, and two fusion proteins (McALMT4-sGFP and MctDT-sGFP) were localized to the tonoplast in Arabidopsis.

[0218] FIG. 3A is a schematic representation of the binary vector construct used for histochemical β-glucuronidase (GUS) staining of selected promoter:GUS reporters selected using in silico promoter prediction approaches. In order to develop a high throughput system for promoter analysis, a GUS/firefly luciferase (LUC) dual reporter gene was constructed by fusing the full coding sequence of LUC to GUS incorporating a flexible linker between the two reporters to minimize the loss of enzymatic activities and conformational interference in the fusion protein.

[0219] FIG. 3B illustrates histochemical GUS staining of 7-day-old transgenic Arabidopsis. FIG. 3C illustrates histochemical GUS staining of 30-day-old transgenic Arabidopsis. Public microarray datasets for circadian clock-controlled genes were analyzed using the JTK-Cycle algorithm for robust circadian rhythms (p-value cut-off=0.05). A total of 982 genes were retrieved and their mesophyll expression patterns verified by comparison to the on-line Arabidopsis eFP Browser (domain name bar.utoronto.ca/efp/cgi-bin/efpWeb.cgi) as well as mesophyll versus guard cell expression patterns. Of these, 14 out of 982 promoter regions were synthesized and tested for their tissue-specific expression patterns in Arabidopsis. Agrobacterium GV3101 harboring the constructs of (a) AT3G59350pro1::GUS/LUC, (b) AT4G32340pro2::GUS/LUC, (c) AT5G23240pro3::GUS/LUC, (d) AT5G44050pro4::GUS/LUC, (e) AT4G04330pro5::GUS/LUC, (f) AT4G23290pro6::GUS/LUC, (g) AT1G07180pro7::GUS/LUC, (h) AT1G65490pro8::GUS/LUC, (i) AT1G21670pro9::GUS/LUC, (j) AT2G17450pro10::GUS/LUC, (k) AT4G01130pro11::GUS/LUC, (l) AT5G19240pro12::GUS/LUC, (m) AT5G58120pro13::GUS/LUC, and (n) AT3G47340pro14::GUS/LUC were transformed into wild-type Arabidopsis (Col-0) and tissue-specific expression patterns of each of T₁ transgenic lines were evaluated by GUS staining. In summary, all of the selected 14 Arabidopsis promoters directed very strong GUS activity within the leaves of Arabidopsis.

[0220] FIG. 4 provides representative GUS-stained tissues of 14 selected Arabidopsis promoters driving GUS expression at various stages of Arabidopsis growth and development. Transgenic Arabidopsis plants were grown on ½ MS medium containing kanamycin (50 mg ml-l) for 30 days. GUS-stained images of detached leaves were captured at 14 and 30 days after germination (DAG). Each line of transgenic Arabidopsis was grown on soil for 60 days and detached-cauline leaves, primary inflorescence stems, flowers, anthers, and siliques were stained for GUS activity. In summary, the 14 selected Arabidopsis promoters drove very strong GUS activity in rosette and cauline leaves at various stages of Arabidopsis growth and development.

[0221] Rhythmic, circadian expression patterns of nine candidate promoters for expressing of ice plant core CAM genes in Arabidopsis are provided in FIG. 5. Based upon these promoter expression patterns, nine out of 14 selected promoters were selected to drive the expression of nine core CAM genes in Arabidopsis. The coding sequences of McBca2, McPpck, McPpc1, McNAD-Mdh2, McNADP-ME3, McPpdk1, McPpdk-RP, McALMT4, and MctDT were driven by AT3G59350pro1, AT1G65490pro8, AT5G23240pro3, AT4G01130pro11, AT1G21670pro9, AT4G23290pro6, AT4G04330pro5, AT5G44050pro4, and AT1G07180pro7, respectively. Native terminator regions of the indicated Arabidopsis genes were also used in the construction of these CAM gene cassettes.

[0222] FIGS. 6A-6D provide schematic illustrations of vector constructs used for multiple CAM gene expression in planta. Current genetic engineering approaches are often not well suited for manipulating or stacking large numbers of plant transgenes. Furthermore, assembly of multi-transcription units (TU) without insulating elements can suffer from transcriptional interference and gene expression can be significantly reduced by heterochromatin-mediated gene silencing. To address these issues, a new framework for quick and reliable assembly was developed for complex gene circuits for engineering plant genes using Multisite Gateway cloning and Gibson isothermal assembly methods. FIG. 6A is a schematic illustration of the position binary vector. For every position binary vector, two fragments of gypsy barrier insulator with different directions (forward and reverse complementary) were employed to prevent the heterochromatin-mediated gene silencing in Arabidopsis. A combination of 2 different unique sequences (UNSes) and I-sce I homing enzyme were cloned into the 11 position binary vectors for Gibson isothermal assembly. The UNSes in the position binary vectors determine the position of each TU within the large gene circuit and attachment (att) R1 and R2 sites are used for Multisite gateway cloning to construct each CAM gene cassette (promoter, gene, protein tag, and terminator).

[0223] FIG. 6B is a schematic illustration of adaptor vectors. Three different gene cassettes of plant selectable markers (e.g., kanamycin, hygromycin, and BASTA) were cloned into the adaptor vectors with different UNSes for selecting of transgenic plants. FIG. 6C is a schematic illustration of the carrier vector. I-sce I and UNSes in carrier vector can allow for further rounds of assemblies and T-DNA right and left borders were used for Agrobacterium-mediated plant transformation. FIG. 6D provides schematics of CAM gene assembly process. In summary, a total of 11 position binary vectors, 33 adaptor vectors, and a carrier vector were constructed to generate large CAM gene circuit for the quick and reliable multi-gene assembly system. The entire sequence of Position Binary Vectors (PBV; SEQ ID NOs: 15-25), Adaptor Vectors for kanamycin (AVK; SEQ ID NOs: 26-36), hygromycin (AVH; SEQ ID NOs: 37-47), and BASTA resistance (AVB; SEQ ID NOs: 48-58), and the carrier vector (SEQ ID NO: 59) are provided in the Sequence listed provided herewith.

[0224] FIG. 7 provides a schematic representation of McBca2 (Beta carbonic anhydrase 2) gene cassette in position binary vector 1. Each part vector harboring AT3G59350pro1 (5′-upstream region; −1114 to +245), McBca2 gene, 4×cMyc protein tag, and AT3G59350Ter1 (3′-downstream region; +2199 to +2629) were recombined with position binary vector 1 via the Mutisite Gateway™ cloning system. The entire sequence of position binary vector 1 containing the McBca2 gene cassette has the nucleic acid sequence of SEQ ID NO: 60.

[0225] FIG. 8 is a schematic representation of McPpck (phosphoenolpyruvate carboxylase kinase) gene cassette in position binary vector 2. Each part vector harboring AT1G65490pro8 (5′-upstream region; −1479 to +21), McPpck gene, V5 protein tag, and AT1G65490Ter8 (3′-downstream region; +406 to +905) were recombined with position binary vector 2 via Mutisite Gateway™ cloning system. The entire sequence of position binary vector 2 containing the McPpck gene cassette is presented as SEQ ID NO: 61.

[0226] FIG. 9 is a schematic representation of McPpc1 (phosphoenolpyruvate carboxylase) gene cassette in position binary vector 3. Each part vector harboring AT5G23240pro3 (5′-upstream region; −1310 to +190), McPpc1 gene, 6×His protein tag, and AT5G23240Ter3 (3′-downstream region; +1869 to +2113) were recombined with position binary vector 3 via Mutisite Gateway™ cloning system. The entire sequence of position binary vector 3 containing the McPpc1 gene cassette is presented as SEQ ID NO: 62.

[0227] FIG. 10 is a schematic representation of McNAD-Mdh2 [NAD(P) malate dehydrogenase 2] gene cassette in position binary vector 4. Each part vector harboring AT4G01130pro11 (5′-upstream region; −1349 to +35), McNAD-McMdh2 gene, Step-tag II protein tag, and AT4G01130Ter11 (3′-downstream region; +2176 to +2675) were recombined with position binary vector 4 via Mutisite Gateway™ cloning system. The entire sequence of position binary vector 4 containing the McMdh2 gene cassette is presented as SEQ ID NO: 63.

[0228] FIG. 11 is a schematic representation of McALMT4 (putative aluminum-activated malate transporter) gene cassette in position binary vector 5. Each part vector harboring AT5G44050pro4 (5′-upstream region; −903 to −1), McALMT4 gene, T7 protein tag, and AT5G44050Ter4 (3′-downstream region; +3727 to +4226) were recombined with position binary vector 5 via Multisite Gateway™ cloning system. The entire sequence of position binary vector 5 containing the McAlmt4 gene cassette is presented as SEQ ID NO: 64.

[0229] FIG. 12 is a schematic representation of MctDT (tonoplast dicarboxylate transporter) gene cassette in position binary vector 6. Each part vector harboring AT1G07180pro7 (5′-upstream region; −1406 to +94), MctDT gene, 3×FLAG protein tag, and AT1G07180Ter7 (3′-downstream region; +2455 to +2954) were recombined with position binary vector 6 via Mutisite Gateway™ cloning system. The entire sequence of position binary vector 6 containing the MctDT gene cassette is presented as SEQ ID NO: 65.

[0230] FIG. 13 is a schematic representation of McNADP-ME3 (NADP-dependent malic enzyme 3) gene cassette in position binary vector 7. Each part vector harboring AT1G21670pro9 (5′-upstream region; −1332 to +11), McNADP-ME3 gene, 4×cMyc protein tag, and AT1G21670Ter9 (3′-downstream region; +2124 to +2607) were recombined with position binary vector 7 via Mutisite Gateway™ cloning system. The entire sequence of position binary vector 7 containing the McNADP-ME3 gene cassette is presented as SEQ ID NO: 66.

[0231] FIG. 14 is a schematic representation of McPpdk1 (pyruvate orthophosphate dikinase) gene cassette in position binary vector 8. Each part vector harboring AT4G23290pro6 (5′-upstream region; −1105 to +16), McPpdk1 gene, AcV5 protein tag, and AT4G23290Ter6 (3′-downstream region; +2918 to +3417) were recombined with position binary vector 8 via Mutisite Gateway™ cloning system. The entire sequence of position binary vector 8 containing the McPpdk1 gene cassette is presented as SEQ ID NO: 67.

[0232] FIG. 15 is a schematic representation of McPpdk-RP (pyruvate orthophosphate dikinase-regulatory protein) gene cassette in position binary vector 9. Each part vector harboring AT4G04330pro5 (5′-upstream region; −1466 to +34), McPpdk-RP gene, AU1 protein tag, and AT4G04330Ter5 (3′-downstream region; +1899 to +2072) were recombined with position binary vector 9 via Mutisite Gateway™ cloning system. The entire sequence of position binary vector 9 containing the McPpdk-RP gene cassette is presented as SEQ ID NO: 68.

[0233] FIGS. 16A and 16B illustrate the cloning efficiency of CAM gene cassette via Gibson isothermal assembly. FIG. 16A is a graph showing each combination of the CAM gene transcription units and plant selectable marker (hygromycin resistance gene cassette) were assembled into a linear carrier vector using Gibson isothermal assembly method. The number of colonies indicates efficiency of the assembly system. Size in Kilobases is the predicted size of the gene circuits. FIG. 16B is a digital image taken following PCR-amplification of CAM genes from the large CAM gene circuit containing 9 gene cassettes. The full-length coding sequences of 9 CAM genes were amplified with appropriate primer pairs. The PCR products were separated on 1% agarose gel. In summary, developed vector sets were efficiently assembled as a large number of CAM gene cassettes (9 CAM gene cassettes) via the Gibson isothermal assembly method.

[0234] FIG. 17 is a schematic representation of a CAM gene circuit for introducing CAM photosynthetic machinery into C₃ Arabidopsis. The unique sequences (UNSes) in the position binary vector determine the CAM gene cassette's position within the CAM gene circuit. To assemble this CAM gene expression cassette, each of the 9 position binary vectors was digested by I-sce I homing enzyme. Each of the nine purified CAM gene cassettes were combined with equimolar amounts of predigested adaptor and carrier vector by the Gibson isothermal assembly method. The Gibson reaction mix exposes the UNSes, permitting annealing, extension, and ligation to form a single large CAM gene circuit. In summary, the entire CAM gene circuit will be transformed into wild-type Arabidopsis and the tissue-succulence engineered Arabidopsis and evaluated for the performance of CAM. Entire sequence of CAM gene circuit containing 9 CAM gene cassettes (TU's Transcription Units) is presented as SEQ ID NO: 69.

[0235] FIG. 18 illustrates subcellular localizations of selected core ice plant CAM genes of the carboxylation module expressed in Arabidopsis. To identify subcellular localizations of ice plant CAM genes in Arabidopsis, semiquantitative RT-PCR (reverse transcription polymerase chain reaction) was conducted and each full-length CDS (coding sequences) of candidate CAM genes was cloned into pGWB405 binary vector as protein fusions containing C-terminal sGFP. Agrobacterium harboring 35S::sGFP (EV control), 35S::McβCA2-sGFP, 35S::McPPCK1-sGFP, 35S::McPPC1-sGFP, 35S::McNAD-Mdh2-sGFP, 35S::McNADP-Mdh1-sGFP, or 35S::McNAD-Mdh-sGFP was transformed into Arabidopsis and subcellular localization was determined by confocal microscopy.

[0236] FIG. 19 illustrates subcellular localizations of selected core ice plant CAM genes of the decarboxylation module in Arabidopsis. Agrobacterium harboring 35S::McNADP-ME3-sGFP, 35S::McNAD-ME1-sGFP, 35S::McNAD-ME2-sGFP, 35S::McNAD-ME4-sGFP, 35S::McPPDK-sGFP, 35S::McPPDK-RP-sGFP, or 35S::McPEPCK-sGFP was transformed into Arabidopsis and subcellular localization was determined by confocal microscopy.

[0237] FIG. 20 illustrates overexpression of each core ice plant CAM gene alters overall plant size in Arabidopsis. Representative images of 4-week-old 35S::sGFP Empty Vector (EV) control, 35S::McβCA2-sGFP, 35S::McPPCK1-sGFP, 35S::McPPC1-sGFP, 35S::McNAD-Mdh2-sGFP, 35S::McNADP-Mdh1-sGFP, or 35S::McNAD-Mdh-sGFP, 35S::McNADP-ME3-sGFP, 35S::McNAD-ME1-sGFP, 35S::McNAD-ME2-sGFP, 35S::McNAD-ME4-sGFP, 35S::McPPDK-sGFP, 35S::McPPDK-RP-sGFP, and 35S::McPEPCK-sGFP transgenic plant. Bar=2 cm.

[0238] FIG. 21 illustrates overexpression of core ice plant CAM gene increases rosette size in Arabidopsis. T3 homozygous seeds of 35S::sGFP Empty Vector (EV) control, 35S::McβCA2-sGFP, 35S::McPPCK1-sGFP, 35S::McPPC1-sGFP, 35S::McNAD-Mdh2-sGFP, 35S::McNADP-Mdh1-sGFP, or 35S::McNAD-Mdh-sGFP, 35S::McNADP-ME3-sGFP, 35S::McNAD-ME1-sGFP, 35S::McNAD-ME2-sGFP, 35S::McNAD-ME4-sGFP, 35S::McPPDK-sGFP, 35S::McPPDK-RP-sGFP, and 35S::McPEPCK-sGFP were germinated and grown in soil mix under a 12-h photoperiod. 4-week-old rosette images were captured and rosette diameter was measured by image J software. Values represent means±s.d., ns=non-significant, *p<0.05, **p<0.01, and ***p<0.001, One-way ANOVA with Dunnett's multiple comparison test. n=10.

[0239] FIG. 22 illustrates overexpression of core ice plant CAM gene increases leaf size in Arabidopsis. T3 homozygous seeds of 35S::sGFP Empty Vector (EV) control, 35S::McβCA2-sGFP, 35S::McPPCK1-sGFP, 35S::McPPC1-sGFP, 35S::McNAD-Mdh2-sGFP, 35S::McNADP-Mdh1-sGFP, or 35S::McNAD-Mdh-sGFP, 35S::McNADP-ME3-sGFP, 35S::McNAD-ME1-sGFP, 35S::McNAD-ME2-sGFP, 35S::McNAD-ME4-sGFP, 35S::McPPDK-sGFP, 35S::McPPDK-RP-sGFP, and 35S::McPEPCK-sGFP were germinated and grown in soil mix under a 12-h photoperiod. 4-week-old leaf images were captured and leaf area was measured by image J software. Values represent means±s.d., ns=non-significant, *p<0.05, **p<0.01, and ***p<0.001, One-way ANOVA with Dunnett's multiple comparison test. n=22.

[0240] FIG. 23 illustrates overexpression of core ice plant CAM gene increases leaf FW in Arabidopsis. T3 homozygous seeds of 35S::sGFP Empty Vector (EV) control, 35S::McβCA2-sGFP, 35S::McPPCK1-sGFP, 35S::McPPC1-sGFP, 35S::McNAD-Mdh2-sGFP, 35S::McNADP-Mdh1-sGFP, or 35S::McNAD-Mdh-sGFP, 35S::McNADP-ME3-sGFP, 35S::McNAD-ME1-sGFP, 35S::McNAD-ME2-sGFP, 35S::McNAD-ME4-sGFP, 35S::McPPDK-sGFP, 35S::McPPDK-RP-sGFP, and 35S::McPEPCK-sGFP were germinated and grown in soil mix under a 12-h photoperiod. 4-week-old leaf was sampled and measured fresh weight (FW). Values represent means±s.d., ns=non-significant, *p<0.05, **p<0.01, and ***p<0.001, One-way ANOVA with Dunnett's multiple comparison test. n=10.

[0241] FIG. 24 illustrates Overexpression of core ice plant CAM gene alters leaf stomatal conductance in Arabidopsis. T3 homozygous seeds of 35S::sGFP Empty Vector (EV) control, 35S::McβCA2-sGFP, 35S::McPPCK1-sGFP, 35S::McPPC1-sGFP, 35S::McNAD-Mdh2-sGFP, 35S::McNADP-Mdh1-sGFP, or 35S::McNAD-Mdh-sGFP, 35S::McNADP-ME3-sGFP, 35S::McNAD-ME1-sGFP, 35S::McNAD-ME2-sGFP, 35S::McNAD-ME4-sGFP, 35S::McPPDK-sGFP, 35S::McPPDK-RP-sGFP, and 35S::McPEPCK-sGFP were germinated and grown in soil mix under a 12-h photoperiod. 4-week-old leaf was used to measure stomatal conductance by SC-1 Leaf Porometer (Decagon Devices, Inc.). Values represent means±s.d., ns=non-significant, *p<0.05 and ***p<0.001, One-way ANOVA with Dunnett's multiple comparison test. n=10.

[0242] FIG. 25 illustrates overexpression of core ice plant CAM gene alters malate content in Arabidopsis. T3 homozygous seeds of 35S::sGFP Empty Vector (EV) control, 35S::McβCA2-sGFP, 35S::McPPCK1-sGFP, 35S::McPPC1-sGFP, 35S::McNAD-Mdh2-sGFP, 35S::McNADP-Mdh1-sGFP, or 35S::McNAD-Mdh-sGFP, 35S::McNADP-ME3-sGFP, 35S::McNAD-ME1-sGFP, 35S::McNAD-ME2-sGFP, 35S::McNAD-ME4-sGFP, 35S::McPPDK-sGFP, 35S::McPPDK-RP-sGFP, and 35S::McPEPCK-sGFP were germinated and grown in soil mix under a 12-h photoperiod. Titratable acidity was measured using 4-week-old leaf. Values represent means±s.d., ns=non-significant and ***p<0.001. One-way ANOVA with Dunnett's multiple comparison test. n=10.

[0243] FIG. 26 provides a schematic representation of the carboxylation module gene cassette. Each transcription gene cassette of P1::McβCA2-4×cMyc, P8::McPPCK1-V5, P3::McPPC1-6×His, and P11::McNAD-Mdh2-Strep-tagII was assembled into one position binary vector 1 via Gibson assembly. The entire sequence of carboxylation module cassette is presented in SEQ ID NO.: 211.

[0244] FIGS. 27A-27E illustrates engineered carboxylation module synergistically increase overall plant biomass. Agrobacterium strain GV3101 harboring the carboxylation module was transformed into Arabidopsis. T3 homozygous seeds of 35S::sGFP Empty Vector (EV) control, 35S::McβCA2-sGFP, 35S::McPPCK1-sGFP, 35S::McPPC1-sGFP, 35S::McNAD-Mdh2-sGFP, and the T2 carboxylation module were germinated and grown in soil mix under a 12-h photoperiod. (27A) Representative images of 5-week-old EV control and the engineered carboxylation module plants. Bar=5 cm (27B) Quantification of rosette diameter (n=10). (27C) Quantification of leaf fresh weight (n=10). (27D) Quantification of leaf dry weight (n=10). (27E) Quantification of leaf number (n=15). Values represent means±s.d., ns=non-significant, *p<0.05, **p<0.01, and ***p<0.001, One-way ANOVA with Dunnett's multiple comparison test.

[0245] FIG. 28 illustrates engineered carboxylation module increase malate content in Arabidopsis. T3 homozygous seeds of 35S:: sGFP Empty Vector (EV) control, 35S::McβCA2-sGFP, 35S::McPPCK1-sGFP, 35S::McPPC1-sGFP, 35S::McNAD-Mdh2-sGFP, and the T2 carboxylation module #2 and #3 were germinated and grown in soil mix under a 12-h photoperiod for 2 weeks. Leaf malate content was measured at dusk (6:00 pm) and dawn (6:00 am) using colorimetric malate assay kit (Sigma). Values represent means±s.d., ns=non-significant and ***p<0.001, One-way ANOVA with Dunnett's multiple comparison test. n=5

[0246] FIGS. 29A and 29B illustrate Engineered carboxylation module increase seed size in Arabidopsis. Seeds of 35S:: sGFP Empty Vector (EV) control, the T2 carboxylation module #2, and #3 were germinated and grown in soil mix under a 12-h photoperiod. (29A) Representative seed images of EV control and the engineered carboxylation module plants. Bar=1 mm (29B) Quantification of seed size (n=30). Values represent means±s.d., ns=non-significant and ***p<0.001, One-way ANOVA with Dunnett's multiple comparison test.

[0247] FIGS. 30A-30D illustrate engineered carboxylation module increases net CO₂ assimilation, stomatal conductance, and ROS scavenging capacity under highlight conditions in Arabidopsis. Seeds of 35S::sGFP Empty Vector (EV) control and the carboxylation module #2 were germinated and grown in soil mix under a 12-hour photoperiod. Gas exchange data were collected using 4-week-old leaves at photosynthetically active radiation (PAR) levels of 0, 50, 100, 150, 300, 400, 500, 100, 2000, and 3000 μmol m⁻²s⁻¹ (n=5). (30A) Quantification of net CO₂ assimilation. (30B) Quantification of stomatal conductance. (30C) Quantification of concentration. (30D) Representative images of leaves after high light treatment.

[0248] FIGS. 31A and 31B illustrate engineered carboxylation module increases nocturnal net CO₂ assimilation and stomatal conductance in Arabidopsis. Seeds of wildtype (wt), 35S::sGFP Empty Vector (EV) control, carboxylation module #2 and #3 were germinated and grown in soil mix under a 12-h photoperiod. Gas exchange data were collected using 4-week-old leaves at photosynthetically active radiation (PAR) levels of 0 and 300 μmol m⁻²s−¹ for 24 hr. (31A) Net CO₂ assimilation. (31B) Stomatal conductance.

[0249] In view of the many possible embodiments to which the principles of the disclosed invention may be applied, it should be recognized that the illustrated embodiments are only preferred examples of the invention and should not be taken as limiting the scope of the invention. Rather, the scope of the invention is defined by the following claims. We therefore claim as our invention all that comes within the scope and spirit of these claims.

1. A method of altering Crassulacean acid metabolism (CAM) pathways, comprising overexpressing one or more genes encoding one or more enzymes involved in carboxylation, decarboxylation and/or malate transport functions in a plant cell, thereby enhancing CAM in the plant cell.

2. The method of claim 1, wherein the one or more genes comprise McALMT4 (putative aluminum-activated malate transporter), MctDT (tonoplast dicarboxylate transporter), McPpdk-RP (pyruvate orthophosphate dikinase-regulatory protein) McBca2 (Beta carbonic anhydrase 2), McPpck (phosphoenolpyruvate carboxylase kinase), McPpc1 (phosphoenolpyruvate carboxylase), McNAD-Mdh2 [NAD(P) malate dehydrogenase 2], McNADP-ME3 (NADP-dependent malic enzyme 3), and/or McPpdk1 (pyruvate orthophosphate dikinase).

3. The method of claim 1, further comprising inserting the one or more genes into a vector construct so that the one or more genes is operably linked to a plant circadian controlling promoter and transforming the plant cell with the generated vector construct.

4. The method of claim 3, wherein the vector construct has a nucleic acid sequence as set forth in SEQ ID NOs: 60-68.

5. The method of claim 3, further comprising combining one or more generated vector constructs, such one, two, three, four, five, six, seven, eight, nine vector constructs into a series of complex gene circuits using the Gibson isothermal assembly approach to generate a CAM gene circuit construct.

6. The method of claim 5, wherein the CAM gene circuit construct has a nucleic acid sequence as set forth in SEQ ID NO: 69.

7. The method of claim 1, wherein the method is used to increase plant cell size, leaf size, leaf number, reduce hypocotyl length, increase hypocotyl length, increase inflorescence width, increase inflorescence height, increase plant root size, increase plant root length, increase plant tissue succulence, increase plant water content, increase plant flower size, increase plant floral organ size, increase plant silique, increase fruit size, increase plant seed size, increase plant seed area, increase plant mass, increase plant seed number, increase plant total seed production; increase plant inflorescence number, increase stomatal conductance, increase malate content, increase CO₂ assimilation, decrease intracellular CO₂ concentration, decrease stromal conductance, decrease malate content, protect against or reduce photoxidative damage, facilitate nocturnal net CO₂ assimilation and stomatal conductance or any combination thereof.

8. The method of claim 1, wherein an increase is an at least two fold increase as compared to a control plant.

9. The method of claim 1, wherein the method is used in combination with one or of the following:
(a) engineered tissue succulence to generate a plant with improved drought tolerance and/or water-use efficiency;
(b) engineered tissue succulence to reduce intracellular air space with the resulting plant becoming an anatomically optimized host for performance of CAM;
(c) engineered tissue succulence to increase plant tolerance to salinity and related salts that impose an ionic stress; and/or
(d) engineered tissue succulence to increase plant tolerance to osmotic stress, such as to mannitol or PEG, and related osmotic agents that impose an osmotic stress.

10. An isolated polynucleotide sequence comprising a plant circadian controlling promoter operably linked to a polynucleotide sequence to a nucleic acid sequence encoding one or more enzymes involved in carboxylation, decarboxylation and/or malate transport functions in a plant cell to effect the proper temporal operation of CAM.

11. The isolated polynucleotide sequence of claim 10, wherein the nucleic acid sequence encodes beta-carbonic anhydrase, phosphoenolpyruvate carboxylase kinase, phosphoenolpyruvate carboxylase, NAD(P) malate dehydrogenase, aluminum-activated malate transporter, tonoplast dicarboxylate transporter, NADP-dependent malic enzyme 3, pyruvate orthophosphate dikinase, and/or pyruvate orthophosphate dikinase-regulatory protein.

12. An isolated polynucleotide sequence comprising a drought-inducible controlling promoter operably linked to a polynucleotide sequence to a nucleic acid sequence encoding one or more enzymes involved in carboxylation, decarboxylation and/or malate transport functions in a plant cell to effect facultative CAM.

13. The isolated polynucleotide sequence of claim 12, wherein the nucleic acid sequence of the isolated polynucleotide sequence is set forth in Tables 1-5.

14. A plant transformation vector system comprising a carrier vector, a set of 33 different adaptor vectors and 11 position binary vectors with the isolated polynucleotide sequence of claim 13.

15. The plant transformation vector system of claim 14, wherein the plant transformation vector sequence is set forth in SEQ ID NOs:15-69.

16. A transgenic plant cell comprising the vector of claim 15.

17. A transgenic plant or plant part thereof of claim 16, wherein the isolated nucleic acid sequence is stably incorporated into its genome and the transgenic plant or plant part has enhanced CAM relative to control plants.

18. The transgenic plant or part thereof of claim 16, wherein the plant is a dicot.

19. The transgenic plant or part thereof of claim 16, wherein the plant is a monocot.

20. A plant cell, fruit, leaf, root, shoot, flower, seed, cutting and other reproductive material useful in sexual or asexual propagation, progeny plants inclusive of F1 hybrids, male-sterile plants and all other plants and plant products derivable from the transgenic plant of claim 17.

21. A method of producing a transgenic plant comprising transforming a plant cell or tissue with the construct of claim 15.

22. A plant transformation vector comprising a GUS-flexible linker-LUC reporter vectors for assessing promoter functionality with the isolated polynucleotide sequence of claim 10 to access spatio-temporal protein expression levels within a plant cell.

23. A plant transformation vector comprising a GUS-flexible linker-LUC reporter vectors for assessing promoter functionality with the isolated polynucleotide sequence of claim 12 to access spatio-temporal protein expression levels within a plant cell.

The application's sequence listing, which the Patent Office published only in electronic form, follows.

SEQUENCE LISTING (211 sequences)

SEQ ID NO: 1 - DNA, 852 bp, M. crystallium
atgacaggaggctttaggaaatgcatggtgctttgttgtgcaagaaaactcccgaaagaaacaacaatgggaaccaccgcatacgacgaagccattacagggctgagcaagcttctcagtgagaagaaaggattggatgatgtagcagccgcaaaaatcaagcagttaacagcagagttgcagcagggcaccaagcaaaatggtgtttccgaaaacgggtttgacccggatgagcgcatcaaatccggattcatccggttcaagactgagaaatatgagaagaatcctgctctgtacggtgaacttgccaagggccagagtcccaagttcttggtatttgcctgctcagactcccgtgtttgcccctcccacatcttggatttcaagccaggggatgccttctcggttcgtaacatcgccaacatggtcccaccttttgataagacaaagttctctgggacaggggcagccattgagtatgctgtattgcatctaaatgtggagaatattgtggtcattggacacagctgctgtggaggaataaaggggctcatgtccatccctgattgtggcaccacttccacagacttcattgaagagtgggtcaagatcgctcagcctgctaggaccaaggtcaaagcagaagttagtagcgcagagttcacggagcagtgcaagaactgcgagaaggaagctgtcaatgtctctctcggaaacttgttgacatacccatttgtgagggaagcagtaatgaagaaaactctggcattgaagggtgcacattatgattttgtcaatggacgtttcgagctgtggaacctcgaatttggcctctcaccttctaccgcagta

SEQ ID NO: 2 - DNA, 837 bp, M. crystallium
atgtgtgagagcttcaagagagaataccagctctgcgaggagatcggtcgaggccgcttcggcgtcgtctaccgctgctacaacccctcctccaccgaagattccgacactcctttggctgtcaagtccattgataagcgcctcctcctcgacgacgagaccgaccgtgagtgccttgacaaggaacccaaaatcctccaccttctctctcctcaccctaatattctgcagatccataacctctttgattctgatacccatctcctcattgttaccgatctctgccaagaggagaccctttacgaacgcattatctctaacggccccttctctgagcctgacgctgcggctattttctgtcagctcgccgaggccctcgctcactgccaccgcaactacgtcgctcaccgtgatatcaaaccagacaacatactattcgactcaaggaacaggctgaagctctgcgacttcggctcggccgagtggttcggagcaggagacagagagatgcgcggtgtggtaggaacaccctactacgtggcgccggaggtgctttccggaaaagactacaatgagaaggcggatgtgtggagtgctggtgttattctctacatcatgctcggtggagttccacccttctatggtgagactgttgaggagacttttgaggctgttcttaggggaaatcttcgctttccggccaggattttccgaaacgtttctactcaggcaagggatttgttgaggaagatgatgtgcaaggatgtttccagaaggttttctgctgaacaagtcttaaggcatccttgggtaaccagtggaggattggccaacatg

SEQ ID NO: 3 - DNA, 2898 bp, M. crystallium
atgtcgactgtgaagctagataggcttacgtcgattgatgcccaattgaggctgcttgcacctaagaaggtctctgaggatgataaacttattgagtatgatgctttgctgctcgatcgcttccttgatattcttcaaaacttacatggggaagacatcaaagaaacggttcaagaattgtatgaacaatctgctgaatatgaaaggacacatgaccccaagaaattggaggagctgggaagcatggtgaccagtttggatgctggagattccattgtggttgccaaatcattttctcacatgcttaacctggctaaccttgctgaagaagtccagatttcccgtcgcaagagggtcaaaaaagtgaagaaaggagattttatggatgagaatactgcgatgactgagtcagatatggaagaaacactgcggaggcttattgtggatttgaagaaatccccacaagaaatttttgaaactttgaaaaaccagacagttgacttagttttcacagctcatcctacacaatctgttcgtagatccttgcttcaaaaacatggaaggataagggattgtttggcccaattgtatgccaaagacattactcccgatgataagcaggagcttgatgaggctctgcaaagagagatacaagctgcatttcgtactgatgaaatcaggaggactcagccaactccacaggatgagatgagagctgggatgagctacttccatgagacaatttggaatggtgttccaaaatttttgcgacgtcttgacacggcattgaagaacataggaataactgagcgtgttccctataatgcccctcttattcagttctcatcttggatgggtggtgatcgagatggaaatccgagagtaacacctgaagttactagggatgtatgtttattggctagaatgatggctgctaatatgtatttctcccagatagacgagctcatgtttgagctctcaatgtggagatgcaccgatgaacttcgtgaacgagcagaggaacttcacaaatattcaaagagagactccaaacactacattgagttttggaaacaaattccttccagtgagccttatcgtgttattcttgctgacgtgagggataagctctactatacacgtgaacgttctcgtcagttgttggcaagtgaggtctctgaaatccccgtcgaagcaaccttcaccgaaattgatcagtttctggagcctcttgagctttgctacagatctctctgtgcttgtggtgataggccagttgcggatggaagtcttcttgatttcatgcgacaagtagctacctttgggctttgtcttgtaaagcttgatattaggcaagaatcagagaggcatactgatgtgatggatgccattactacgcacctgggcattgggtcctaccgagactggacagaagagaagaggcaggattggctcttatctgagcttaggggcaagcgccctttgtttggccctgatcttcccagaactgatgaaattgctgatgttttggacacaataaatgtaatcgcagaactcccatctgatagtttcggcgcttatgttatctcgatggctactgccccttctgatgtgcttgctgttgagcttctgcaacgtgaatgtaaagttaaaaagcctttgagggttgttccattgtttgagaaacttgctgacctggaggctgctcctgcttctatgacccgcctattctccgtagattggtataaaaataggattgatgggaagcaagaagtcatgatcggatactctgattctggtaaggatgctggtcgtctctcagccgcttggcaaatgtacaaggttcaggaagagctgcttaaggtttctaagaaatttggggtgaagctcacaatgtttcatggacgaggaggaacggtgggaagaggagggggtcctactcatcttgctattttggcacagccagctgaaactattggtggatcacttcgtgttacaattcaaggtgaagtgattgaacaatcctttggagagcagcacttgtgttttagaacactccagcgttatacagctgctacacttgaacatgggatgaatccaccaaaatctcctaagccagaatggcgtgctctcttggaccagatggctgttgttgccacagaggaataccgctccatagtttttaaggagcctcgatttgtcgagtacttccgtctcgcaacgccagaaacggagtatgggcgcatgaacattgggagcaggccatcaaagagaaagccaagtggtggaattgaatctctccgtgcaatcccttggatctttgcatggactcaaactaggttccatctgcctgtgtggctgggcgttggcggagcacttaaacatgtccttgagaaagatataaggaaccataacatgcttagggacatgtacaacaatttccctttcttcagggtgaccattgatttgcttgaaatggtgttcgctaagggagaccctgaaattgccgctttatatgacaaactactggtgtcagaggagctgcagtcctttggggagcgtttgagggcaaattatgaagacactaaacgccgtctcctcgaggtcgctgggcataaagacctgctagagggagatccttacttgaaacagaggctccgccttcgtgatccctacatcacaaccctcaatgtctgccaagcgtataccctgaagcggattcgtgatcccgacttcaaggtaacagagaggccacacttatccaaggaaatcatggacgcacacaaggcagctgctgagctggtgaagctaaaccccactagtgagtatgctcctggacttgaagacacacttatcttaaccatgaagggtgttgctgctggtctgcagaacactggt

SEQ ID NO: 4 - DNA, 996 bp, M. crystallium
atggccgttgaacctcttcgcgttcttgtcaccggcgccgccgggcaaattgggtatgctctcgttcccatgattgctaggggaataatgctgggtgctaatcagcctgtgatcttgcacatgctcgatattcctccagcagccgaggcattgaacggagtgaaaatggagctggtggatgctgcctttccacttcttaaaggcgttgttgctacaaccgatgctgctgaagcctgcaaaggtgtaaatgttgctgtcatggttggtggcttcccaaggaaagaaggcatggagaggaaggatgtgatgtcaaagaatgtttccatctacaaggctcaagcttctgctcttgagcaacatgctgctcccaattgcaaggttttggttgttgccaaccctgccaacaccaatgctttgatcctaaaggaatttgccccatcaatcccggagaagaacatttcttgtttgacaaggcttgaccacaacagagctctaggtcagatctcagagagattgaatgttcaagtctctgatgttaagaatgtgattatttggggaaaccactcctcaactcaataccctgatgtcaaccacgctaccgtgaaaacacagggtgttgataagcctgttcgtgagcttgttgctgatgatgcatggttgaatggagagttcataacaactgtgcaacagcgtggagctgccatcatcaaggcaaggaagctctccagtgcattgtcagctgctagttctgcttgtgatcacatccatgattgggtgcttggaaccccagagggaacatgggtatctatgggtgtgtattctgatggctcgtacaatgtgccagctggaatcatttactccttcccagtaacttgtaaaaatggagaatggacaatcgtccaagggctgccaattgacgatgactcaaggaagaaaatggatgcaactgctgcagagcttgtcgaggagaagacattggcctactcatgcctgact

SEQ ID NO: 5 - DNA, 1842 bp, M. crystallium
atggcggggaaattcggatcactgaggcagagtttcattgaaagaagcaaagagaggttgctatctcgaagagggtattcggagctagggttacctggctccgatggtgatgttgaagatgagggcaatagcgatgtcaaatgcggttgtttccgatcaatttgcggcgggagaagtcgaaattccgatagcggaaatcgatctaagggcggatgttaccggtggatttgtgatcggatattagggttctgtaatgggtttaaggaagttgcaggtaaattttatgagatgggtcgatctgatcctcgaaaggtgttctttgcagcgaagatgggtgggagcttagctttggtttcaatgctcatcttcttgaggggacctttatcggatattcgtcagtatgctatttgggctattttaactgtcattgtctgtttcgagtacagcgtaggagcatgtcttagtaaaggccttaaccgtggtctgggaacggtaactgctggaagtattgctttcgggctagcagaattagcagttcggtctggtgaatacaaagaaccgctcattattatgtatatgttcttcgcaggttctattgcgacctacattaaattatacccaacaatgaaagaatacgaatatgggtttcgggtattccttatgacatttgccatagtaatggtgactggaaataaaacaacaaattttttccaaactgcttttttccggttgttgcttatttcaattggtgctgtcatagcttcagtggttaacatatgtgtttaccctatttggtctggcaccgatcttcataaggtggtggtgaaaaatttcaagggtgttgctacttctttggaaggctgtttaaatggatacttgcagtgtgtagcgtatgataaaatcccttcaaagattcttacgtaccaagcttatgatgaccctacatatggtggctatagaacagctgtccagtcagcaagtcaagaagaaactctgttgagctttgcgaaatgggagcctcctcatggcccttatagatcatgcaattatccttgggaatcctatgttaaagttagtggggcactgagacattgtgcttttatggttatggcaatgcatggatgcattcttgcagaaatacaggcaccaccagagaagagacaggtttttgccgatgaacttcgcagggttggcatggccggtgctaaagtcatacgtgaacttgggaacaaagttgagaaaatggagaaactaagccccggtgatatacttgcagaagtacatacggcagcagaggagctgcaaatgagaatcgatgagaagtcttatctcctggtcaatttcgagaaatgggaagaaggcaaacgaccaaaggaatttgatgaccctgagcgtgtttctcaaatgaagagttatggaagtggtcagcttgttataaactccctaagtgaagcagtgctaagtattgaacccgagcagatgcaatcatacattgataatatgagttcaagggtttcaatgattggtgctggcccttcattgcaaggtatgttttccactgatagtatggcgactagaactcagtggccttcacgtctttcactcctaccagacctgagcatcaatgaaaaggaagcgaaaacatatgagagcgcaagctccttgtcactagcaacttttgcttcacttctagtagaatttgtggcaagacttggatatttggtggaggcctttgaggaactcagtgagaaagcagctttcaaggagcaaagtgagctagaagacgaaaaggcgagtaatgggctctggcataagttgatggtgtcccttcagttcagaaat

SEQ ID NO: 6 - DNA, 1647 bp, M. crystallium
atgaatcataatcacgatcccaaaactccccttctcccaacccatcatgatgatgatcatcaagggcggccaacacctgagcgttccacctcagttatcatgtcccttgccacacccaacacggccttcgtcctcctaggacccctcttgtgtacccttgtaatgttgtgtgtcaagttcgatgggaccgagtcgagccggaacatgctggctatcctggtctggatcttcacgtggtggctcaccgaggctgttccgatgcctatcacctccatgtcgccgttgtttctatttccggtgtttggtatcgcctcggccgacgctgttgctaagtcgtacatggacgatgtcatctctcttgtgcttggtagcttcattcttgctcttgctgttgagcactacaatattcacaagaggctggccttgaatataacattgttattctgtggggacccagtgaacccaccgttgctcctcctggggatctgcgccaccacagctttcgtcagcatgtggatgcacaacgtggcagccaccgtcatgatgatgccagtggccaccggaatcctccagagatttccatccacaagagaaggcggccgaaacgacgccgttgacaagttcagtagggcagttgtgcttggggtgatatactctgccacaattggtggtatcagcactctgactgggacaggtgtcaacctcatattggctggcatgtggaagagctatttccctcaagcggaccccatcagcttcaacacgtggctcttttatgggttcccattggctgtctttatcttcttctcgttgtgggccatactttgttgtttgtattgcaaacgtgggtcgggccgggtccttcaggagtatttggataaggatcaccttcaaagagagctcgacttgttaggtccaatgtcctttgcagaaaaaatggtattatccgtctttttggggcttattatgctatggatgacaaggaatctaaccgatggtatccctggatggggagctctatttaaagggagggccggtgatggcactgctagtgttatgatggcaactttgttattcataatacccaacaagaggagaaagggagaaaagctaatggactggactaagtgcaagaaactaccttggaacgttgttcttctacttggggccggctttgccatcgcagatggggtgcggtcaagcggcctagcggacgtgctttcccgcgccttggacttcctagagacggctccattttgggcaattgcacccatggtgtgtctcataggtgggatcatgaccgagttcacctccaacaatgccaccacgacattgttggttcctctgttgatccaaattgcacagacgatgcacgtgcatccgcttcttcttatggtccctggagccgttggggcccaattcgccttcttgcttccgactggaactccttccaatatagttgggttcaccactggtcatattgacatcaaggatatgattaaaactggtctccctctaaagattgctgggacagttgtactctcatttttaatgcctacccttggagcctacgtttttgggacaaacaacaaaccgctgatgtacccacaaagttggcgtagtttgtattcaaattcgggatataca

SEQ ID NO: 7 - DNA, 1755 bp, M. crystallium
atgggtggtagcaatgcattgaatgagatgaccaatggatctgatggtattactgggggtgttgctgatgtctatggtgaagagtttgccacccaggatcagcttgtcaccccttggagcttctctgttgcttgtggtcattcattgttgagagatccccagcacaacaaagggcttgcttttacagagaaagagagagatgcccacttcttgcgcggtctgttaccccctgtagttctgtcacaagagctccaggagaagaagttcttgacgactcttcgtcaatatcaagttcccttgcagaaatacatggccatgatggatcttcaggagaggaatgagaaactgttctacaaacttcttgttgaccatgtcgaagaactgcttcctcttgtttatacgccaactgttggtgagggatgccaaaagtatggaagtatttttagacgtccccaggggctattcatcagtttgaaggataagggaagaatccttgagcttttgagaaactggcctgaaaagaaaattcaagttattgtagttactgatggtgaacgcatactggggctaggagaccttggctgtcagggaatgggaatacctgttggaaaactttccttgtattcagcccttggtggagtctgcccatcagcatgcttgcctataacccttgatgttggcaccaacaatcagaagttgttagatgatgaattttacattggattgaagcagaagcgggctactggagaggaatatgctgagtttgtccaagaattcatgtctgcagttaagcaaaactatggggagaagatccttgtacagtttgaagattttgccaaccataacgcatttgagttgctggagaaataccgcaccactcacctcgtcttcaatgatgacattcagggtactgcttctgttgttcttgcaggacttattgcttctttaaaactactagggggaaccttggctgaccataaatttttgttcctcggtgctggagaagctggaacgggtattgcagagcttatagcccttgagatgtcaaagaagacaaaggctccagtagagcagatgaggaaaaagatttggcttgtcgactccaagggacttgttgttagctctaggaaggagacacttcagcagttcaaactaccttgggctcacgaacatgaacccattacaactcttatagatgctgtccaggcaatcaagcccacagtgttgattggtacttctggaaaagggaaacaatttaccaaggaggtcgttgaagccatggcaaatatcaatgcgaaacctctcattcttgctctatcaaatcctacttcacagtcagaatgtactgccgaagaagcctacacatggagtcagggacatgcaatatttgccagtggaagcccatttgaccctgttgaatatgaaggaagaacttttgtccctggccaggcaaataatgcttacattttccctgggtttggtttgggtctgatcatgtgtggtgcaatccgtgtccatgatgacatgctattggctgcctctgaggcactggcttcacaagttacaggagaacatttcataaagggacttatctacccaccattcaaggacatcagaaagatatcagctcacattgctgccggagtagctgcaaaagcttatgaacttggtttggctagtcggcttcctcaaccagccgatcttgttaagtttgccgagagctgcatgtacaaccctacttaccggagtttccgt

SEQ ID NO: 8 - DNA, 2847 bp, M. crystallium
atggcgtcagctttcaaggggatcttgatcagatctccacctgatgtctgtgcagagacagtagcaaaagtgagccaatgcaatcgagctcaacttgttaagaattcgtccactggttttaaaaatatcttcaaattatcagaggccaggaaatttcacgctccagttgcaagtcatttgaggtcacaagccgtcatggccccagcctcagacccaacatcaactgcaataaagagagtattcacctttggtaaaggaaggagtgaaggcaacaagggtatgaagtccttgttgggaggtaaaggagcaaaccttgcagagatggccagcataggcttatccgtcccacctggattgactatttctacagaagcatgccaagagtaccaggagcatggaaaacagctctctgctggtttgtgggaggagatattggagggattgagagtcatagagaaggatatggggtcttaccttggagacccttctaagcctcttctgctttcagttcgttctggtgctgcgatttccatgccagggatgatggacactgtcctcaatctaggacttaatgacgatgtggttgcaggactggcagcaaaaagtggagaacgctttgcttacgactcatacagacgtttcctggacatgtttggtaatgtagtcatgggtatttctcactcatcatttgaagagaagttagaaaagttgaagcaggcaaaaggtgttaaacttgatacggagctaactgcatctgatctaaaagaggtagtagaacagtacaagaacgtctatcttgaagtaaaaggagaaaagtttcctgctgatccagaaagacagcttcagcttgctattcaagcagtatttgattcatgggatagtccaagggccatcaagtatcggaacattaaccagataacaggactgaaagggactgcagttaatatccagtgtatggtgtttggtaacatgggaaatacttcagggactggtgttcttttcactcgaaacccaagcactggtgaaaagaagctctatggggaattcctgattaatgctcagggagaagatgtagttgccggcattagaacgccagaagacttggacaccatgaggagctgcatgcctgaagcttacaaggagcttgtggagaactgtgaaattctggaacgacattacaaggatatgatggatattgaattcactgttcaagaaaataggctatggatgttgcaatgccgatctggtaaacgaactggtaaaggtgctgtgaagatagctgtagacttggtgaaagaaggaatagtcgacacttacactgctattaagatggtggaaccacagcatcttgatcaacttcttcacccacagtttgaagacccatctgcttataaagacagagtgattgctactggcctgccggcatctcctggagctgctgttgggcagattattttcagtgctgatgaagctgaatcatggcaagcacaaggaaagagtgtcattctggtgaggaatgaaactagcccagaggatgttgggggtatgcatgcagcaattggaatcttaactgctaggggtggcatgacatctcatgcagctgttgtagcccgtgggtggggaaaatgttgtgtttcagggtgctctgaaatccgagtgaatgatacagacaaggttcttttggttggagacaaagtaatatcagaaggtgattggctttcacttaatggatctactggtgaagttatcttagggaaagtaccactttcacctcctgctctcagtggggatctagaaaccttcatgtcttgggcggatgatatacgtgtccttaaggtcatggcaaatgctgacacaccagaggatgctttggcagcaagaaacaatggtgctgaaggaattggactttgcaggacagagcacatgttttttgcttcagatgataggattaagacagtgaggaagatgataatggcagtaacatccgaacagagaaaagtggctctggaccagctattgccttatcaaagatccgacttcgaagggatttttcgggcaatggatggtcttccagtgacaattagattgttggaccctccactacatgagttccttcctgaaggtgatgtagaacaaattgtcagtgaacttaccttggagactggcatggctgaagatgaaatcttttccaggattgaaaagttgtcagaggtcaatcctatgttgggtttcagaggctgcaggttggggatatcatacccagaactaactgaaatgcaagcacgggcaatcttccaagctgctgtttcaatgagcaaccagggtgttaaagtttttcctgagataatggttccccttgtaggaacgcctcaggaattaggacatcaagtgagcttgatacggaatgttgcagaaaaggtattctctgagacgggttcctccttgagttacaaggtgggaacaatgattgagatccctagggcggctctggttgcagatgagattgcaatggaagcagaattcttctcttttgggacgaatgatctcacgcaaatgacctttgggtatagcagagatgatgttggcaagttcctccctgtatacttgtccaagggcatacttcagagtgatccatttgaggttttggaccagaaaggtgtgggccaactcatcaaactagcaacggagaagggccgtagtgcaaggcctagcttaaaggttggcatatgtggggagcatggaggagaaccgtcatctgttgcatttttcgcggaagcaggattggactacgtttcatgttcccctttcagggttccaattgcaaggctggcagcagctcaagtcgtt

SEQ ID NO: 9 - DNA, 1209 bp, M. crystallium
atgttagcttgtgctagcctcggcctcccaaaaacccaaccgccaccgccactagtttcaccggcacctgaaccaagccgtccggccccagccccatccgtttctctctcctctgactcagcaacctcacttcctcaggcccaaccccaggcccgaaaattaaagggcagctcaaagctgaacctctggtcaagaaatcgggccatacggtccggccggaaactgaaccggccggctaaaaatacggcccaggccgccgttgaaattgcgaattatcctcgaaccagggtcgatgggtccgattctgacggagaagatgacggcgatattcgagaggggaaggcgatatacatggtgtctgacggaactgggtggacggcggaacacgccgttacggcagctttgggtcagttcgattattgcttggtcgatcatggttgccctgttaatacccatttgttttctgggatagatgatgtagagcgtctgatggaaattgtgaaacaagcagcaaaagaaggtgctatgcttgtctatacgcttgctgattcatcaatggctgaatctgccaaaaaagcctgcaaactgtggggtgttccatcaaccgatgttctgggcccaataacggagtcaattgcttctcatcttggcgcctcaccttcaggactccctcgtggtgctggaggtgtaaatgttcccctaagtgaagactatttccgaagaattgaagccatagagtttaccatcaagcaagatgatggggctcttcctcagaacttgcataaggctgaacttgtactcactggtgtatctcgaactggaaaaactccactatcaatttacctggcacaaaaaggatacaaagtggcaaatgttccaatcgtaatgggtgtggatttaccaaaaactctgtttgagatagaccctgataaggtttttggtttgactataaatccggtaatcttgcaatcaattaggaagtcacgagccaagagcctgggattagctgaagatgagacgactagctattctgaaatggactatgtgagaggcgagttggtgaacgcgactaaaatcttctcacaaaatcctaagtggcgggtcgttgaggtgactagtaaagccattgaagaatctgcagcagttatcttgaggctgtaccatgacagaaagcagaagtgtttgatgcccagaatatctaagcgctat

SEQ ID NO: 10 - DNA, 80 bp, Artificial Sequence
  Synthesized DNA sequence upstream of position binding vector
aagcttattaccctgttatccctaaccggtttaccgagctcttattggttttcaaacttcattgactgtgcccctgcagg

SEQ ID NO: 11 - DNA, 80 bp, Artificial Sequence
  Synthesized DNA sequence upstream of position binding vector
aagcttattaccctgttatccctaaccggtgcgtttttatgcttgtagtattgtataatgtttttaagatcccctgcagg

SEQ ID NO: 12 - DNA, 80 bp, Artificial Sequence
  Synthesized DNA sequence upstream of position binding vector
aagcttattaccctgttatccctaaccggtctaatacccaatctctcgtcttatccagatgttttatacgcccctgcagg

SEQ ID NO: 13 - DNA, 80 bp, Artificial Sequence
  Synthesized DNA sequence upstream of position binding vector
aagcttattaccctgttatccctaaccggtgaattcccttatgtgagtgtaaaaggcaggcgagtttgtccccctgcagg

SEQ ID NO: 14 - DNA, 80 bp, Artificial Sequence
  Synthesized DNA sequence upstream of position binding vector
aagcttattaccctgttatccctaaccggttgcttgcaaaagcagtaattggaaagcactctcaaagaatcccctgcagg

SEQ ID NO: 15 - DNA, 11376 bp, Artificial Sequence
  A synthetic DNA vector
gtttacccgccaatatatcctgtcaaacactgatagtttaaactgaaggcgggaaacgacaatctgatccaagctcaagctgctctagcattcgccattcaggctgcgcaactgttgggaagggcgatcggtgcgggcctcttcgctattacgccagctggcgaaagggggatgtgctgcaaggcgattaagttgggtaacgccagggttttcccagtcacgacgttgtaaaacgacggccagtgccaagcttattaccctgttatccctaaccggtttaccgagctcttattggttttcaaacttcattgactgtgcccctgcaggcacgtaataagtgtgcgttgaatttattcgcaaaaacattgcatattttcggcaaagtaaaattttgttgcataccttatcaaaaaataagtgctgcatactttttagagaaaccaaataattttttattgcatacccgtttttaataaaatacattgcataccctcttttaataaaaaatattgcatactttgacgaaacaaattttcgttgcatacccaataaaagattattatattgcatacccgtttttaataaaatacattgcataccctcttttaataaaaaatattgcatacgttgacgaaacaaattttcgttgcatacccaataaaagattattatattgcataccttttcttgccataccatttagccgatcaattgtgctcggcatctagagttatcaacaagtttgtacaaaaaagctgaacgagaaacgtaaaatgatataaatatcaatatattaaattagattttgcataaaaaacagactacataatactgtaaaacacaacatatccagtcactatggcggcccctcgaggggccgcattaggcaccccaggctttacactttatgcttccggctcgtataatgtgtggattttgagttaggatccggcgagattttcaggagctaaggaagctaaaatggagaaaaaaatcactggatataccaccgttgatatatcccaatggcatcgtaaagaacattttgaggcatttcagtcagttgctcaatgtacctataaccagaccgttcagctggatattacggcctttttaaagaccgtaaagaaaaataagcacaagttttatccggcctttattcacattcttgcccgcctgatgaatgctcatccggaattccgtatggcaatgaaagacggtgagctggtgatatgggatagtgttcacccttgttacaccgttttccatgagcaaactgaaacgttttcatcgctctggagtgaataccacgacgatttccggcagtttctacacatatattcgcaagatgtggcgtgttacggtgaaaacctggcctatttccctaaagggtttattgagaatatgtttttcgtctcagccaatccctgggtgagtttcaccagttttgatttaaacgtggccaatatggacaacttcttcgcccccgttttcaccatgggcaaatattatacgcaaggcgacaaggtgctgatgccgctggcgattcaggttcatcatgccgtctgtgatggcttccatgtcggcagaatgcttaatgaattacaacagtactgcgatgagtggcagggcggggcgtaaagatctggatccggcttactaaaagccagataacagtatgcgtatttgcgcgctgatttttgcggtataagaatatatactgatatgtatacccgaagtatgtcaaaaagaggtgtgctatgaagcagcgtattacagtgacagttgacagcgacagctatcagttgctcaaggcatatatgatgtcaatatctccggtctggtaagcacaaccatgcagaatgaagcccgtcgtctgcgtgccgaacgctggaaagcggaaaatcaggaagggatggctgaggtcgcccggtttattgaaatgaacggctcttttgctgacgagaacagggactggtgaaatgcagtttaaggtttacacctataaaagagagagccgttatcgtctgtttgtggatgtacagagtgatattattgacacgcccgggcgacggatggtgatccccctggccagtgcacgtctgctgtcagataaagtctcccgtgaactttacccggtggtgcatatcggggatgaaagctggcgcatgatgaccaccgatatggccagtgtgccggtctccgttatcggggaagaagtggctgatctcagccaccgcgaaaatgacatcaaaaacgccattaacctgatgttctggggaatataaatgtcaggctcccttatacacagccagtctgcaggtcgaccatagtgactggatatgttgtgttttacagtattatgtagtctgttttttatgcaaaatctaatttaatatattgatatttatatcattttacgtttctcgttcagctttcttgtacaaagtggttgataacagcgcttagagctctgccgagcacaattgatcggctaaatggtatggcaagaaaaggtatgcaatataataatcttttattgggtatgcaacgaaaatttgtttcgtcaacgtatgcaatattttttattaaaagagggtatgcaatgtattttattaaaaacgggtatgcaatataataatcttttattgggtatgcaacgaaaatttgtttcgtcaaagtatgcaatattttttattaaaagagggtatgcaatgtattttattaaaaacgggtatgcaataaaaaattatttggtttctctaaaaagtatgcagcacttattttttgataaggtatgcaacaaaattttactttgccgaaaatatgcaatgtttttgcgaataaattcaacgcacacttattacgtgggcgcgccttaattaaattaatggtaccggtgcgtttttatgcttgtagtattgtataatgtttttaagatccttaattaatagggataacagggtaatactagtggcgcgcctatttctgaattcccgatctagtaacatagatgacaccgcgcgcgataatttatcctagtttgcgcgctatattttgttttctatcgcgtattaaatgtataattgcgggactctaatcataaaaacccatctcataaataacgtcatgcattacatgttaattattacatgcttaacgtaattcaacagaaattatatgataatcatcgcaagaccggcaacaggattcaatcttaagaaactttattgccaaatgtttgaacgatcggggatcatccgggtctgtggcgggaactccacgaaaatatccgaacgcagcaagatatcgcggtgcatctcggtcttgcctgggcagtcgccgccgacgccgttgatgtggacgccgggcccgatcatattgtcgctcaggatcgtggcgttgtgcttgtcggccgttgctgtcgtaatgatatcggcaccttcgaccgcctgttccgcagagatcccgtgggcgaagaactccagcatgagatccccgcgctggaggatcatccagccggcgtcccggaaaacgattccgaagcccaacctttcatagaaggcggcggtggaatcgaaatctcgtgatggcaggttgggcgtcgcttggtcggtcatttcgaaccccagagtcccgctcagaagaactcgtcaagaaggcgatagaaggcgatgcgctgcgaatcgggagcggcgataccgtaaagcacgaggaagcggtcagcccattcgccgccaagctcttcagcaatatcacgggtagccaacgctatgtcctgatagcggtccgccacacccagccggccacagtcgatgaatccagaaaagcggccattttccaccatgatattcggcaagcaggcatcgccatgggtcacgacgagatcatcgccgtcgggcatgcgcgccttgagcctggcgaacagttcggctggcgcgagcccctgatgctcttcgtccagatcatcctgatcgacaagaccggcttccatccgagtacgtgctcgctcgatgcgatgtttcgcttggtggtcgaatgggcaggtagccggatcaagcgtatgcagccgccgcattgcatcagccatgatggatactttctcggcaggagcaaggtgagatgacaggagatcctgccccggcacttcgcccaatagcagccagtcccttcccgcttcagtgacaacgtcgagcacagctgcgcaaggaacgcccgtcgtggccagccacgatagccgcgctgcctcgtcctgcagttcattcagggcaccggacaggtcggtcttgacaaaaagaaccgggcgcccctgcgctgacagccggaacacggcggcatcagagcagccgattgtctgttgtgcccagtcatagccgaatagcctctccacccaagcggccggagaacctgcgtgcaatccatcttgttcaatcatgcgaaacgatccagatccggtgcagattatttggattgagagtgaatatgagactctaattggataccgaggggaatttatggaacgtcagtggagcatttttgacaagaaatatttgctagctgatagtgaccttaggcgacttttgaacgcgcaataatggtttctgacgtatgtgcttagctcattaaactccagaaacccgcggctgagtggctccttcaacgttgcggttctgtcagttccaaacgtaaaacggcttgtcccgcgtcatcggcgggggtcataacgtgactcccttaattctccgctcatgatgaattcagaaataaattcagcctaattcggcgttaattcagtacattaaaaacgtccgcaatgtgttattaagttgtctaagcgtcaatttgtttacaccacaatatatcctgccaccagccagccaacagctccccgaccggcagctcggcacaaaatcaccactcgatacaggcagcccatcagtccgggacggcgtcagcgggagagccgttgtaaggcggcagactttgctcatgttaccgatgctattcggaagaacggcaactaagctgccgggtttgaaacacggatgatctcgcggagggtagcatgttgattgtaacgatgacagagcgttgctgcctgtgatcaattcgggcacgaacccagtggacataagcctgttcggttcgtaagctgtaatgcaagtagcgtatgcgctcacgcaactggtccagaaccttgaccgaacgcagcggtggtaacggcgcagtggcggttttcatggcttgttatgactgtttttttggggtacagtctatgcctcgggcatccaagcagcaagcgcgttacgccgtgggtcgatgtttgatgttatggagcagcaacgatgttacgcagcagggcagtcgccctaaaacaaagttaaacatcatgggggaagcggtgatcgccgaagtatcgactcaactatcagaggtagttggcgtcatcgagcgccatctcgaaccgacgttgctggccgtacatttgtacggctccgcagtggatggcggcctgaagccacacagtgatattgatttgctggttacggtgaccgtaaggcttgatgaaacaacgcggcgagctttgatcaacgaccttttggaaacttcggcttcccctggagagagcgagattctccgcgctgtagaagtcaccattgttgtgcacgacgacatcattccgtggcgttatccagctaagcgcgaactgcaatttggagaatggcagcgcaatgacattcttgcaggtatcttcgagccagccacgatcgacattgatctggctatcttgctgacaaaagcaagagaacatagcgttgccttggtaggtccagcggcggaggaactctttgatccggttcctgaacaggatctatttgaggcgctaaatgaaaccttaacgctatggaactcgccgcccgactgggctggcgatgagcgaaatgtagtgcttacgttgtcccgcatttggtacagcgcagtaaccggcaaaatcgcgccgaaggatgtcgctgccgactgggcaatggagcgcctgccggcccagtatcagcccgtcatacttgaagctagacaggcttatcttggacaagaagaagatcgcttggcctcgcgcgcagatcagttggaagaatttgtccactacgtgaaaggcgagatcaccaaggtagtcggcaaataatgtctagctagaaattcgttcaagccgacgccgcttcgcggcgcggcttaactcaagcgttagatgcactaagcacataattgctcacagccaaactatcaggtcaagtctgcttttattatttttaagcgtgcataataagccctacacaaattgggagatatatcatgcatgaccaaaatcccttaacgtgagttttcgttccactgagcgtcagaccccgtagaaaagatcaaaggatcttcttgagatcctttttttctgcgcgtaatctgctgcttgcaaacaaaaaaaccaccgctaccagcggtggtttgtttgccggatcaagagctaccaactctttttccgaaggtaactggcttcagcagagcgcagataccaaatactgtccttctagtgtagccgtagttaggccaccacttcaagaactctgtagcaccgcctacatacctcgctctgctaatcctgttaccagtggctgctgccagtggcgataagtcgtgtcttaccgggttggactcaagacgatagttaccggataaggcgcagcggtcgggctgaacggggggttcgtgcacacagcccagcttggagcgaacgacctacaccgaactgagatacctacagcgtgagctatgagaaagcgccacgcttcccgaagggagaaaggcggacaggtatccggtaagcggcagggtcggaacaggagagcgcacgagggagcttccagggggaaacgcctggtatctttatagtcctgtcgggtttcgccacctctgacttgagcgtcgatttttgtgatgctcgtcaggggggcggagcctatggaaaaacgccagcaacgcggcctttttacggttcctggccttttgctggccttttgctcacatgttctttcctgcgttatcccctgattctgtggataaccgtattaccgcctttgagtgagctgataccgctcgccgcagccgaacgaccgagcgcagcgagtcagtgagcgaggaagcggaagagcgcctgatgcggtattttctccttacgcatctgtgcggtatttcacaccgcatatggtgcactctcagtacaatctgctctgatgccgcatagttaagccagtatacactccgctatcgctacgtgactgggtcatggctgcgccccgacacccgccaacacccgctgacgcgccctgacgggcttgtctgctcccggcatccgcttacagacaagctgtgaccgtctccgggagctgcatgtgtcagaggttttcaccgtcatcaccgaaacgcgcgaggcagggtgccttgatgtgggcgccggcggtcgagtggcgacggcgcggcttgtccgcgccctggtagattgcctggccgtaggccagccatttttgagcggccagcggccgcgataggccgacgcgaagcggcggggcgtagggagcgcagcgaccgaagggtaggcgctttttgcagctcttcggctgtgcgctggccagacagttatgcacaggccaggcgggttttaagagttttaataagttttaaagagttttaggcggaaaaatcgccttttttctcttttatatcagtcacttacatgtgtgaccggttcccaatgtacggctttgggttcccaatgtacgggttccggttcccaatgtacggctttgggttcccaatgtacgtgctatccacaggaaagagaccttttcgacctttttcccctgctagggcaatttgccctagcatctgctccgtacattaggaaccggcggatgcttcgccctcgatcaggttgcggtagcgcatgactaggatcgggccagcctgccccgcctcctccttcaaatcgtactccggcaggtcatttgacccgatcagcttgcgcacggtgaaacagaacttcttgaactctccggcgctgccactgcgttcgtagatcgtcttgaacaaccatctggcttctgccttgcctgcggcgcggcgtgccaggcggtagagaaaacggccgatgccgggatcgatcaaaaagtaatcggggtgaaccgtcagcacgtccgggttcttgccttctgtgatctcgcggtacatccaatcagctagctcgatctcgatgtactccggccgcccggtttcgctctttacgatcttgtagcggctaatcaaggcttcaccctcggataccgtcaccaggcggccgttcttggccttcttcgtacgctgcatggcaacgtgcgtggtgtttaaccgaatgcaggtttctaccaggtcgtctttctgctttccgccatcggctcgccggcagaacttgagtacgtccgcaacgtgtggacggaacacgcggccgggcttgtctcccttcccttcccggtatcggttcatggattcggttagatgggaaaccgccatcagtaccaggtcgtaatcccacacactggccatgccggccggccctgcggaaacctctacgtgcccgtctggaagctcgtagcggatcacctcgccagctcgtcggtcacgcttcgacagacggaaaacggccacgtccatgatgctgcgactatcgcgggtgcccacgtcatagagcatcggaacgaaaaaatctggttgctcgtcgcccttgggcggcttcctaatcgacggcgcaccggctgccggcggttgccgggattctttgcggattcgatcagcggccgcttgccacgattcaccggggcgtgcttctgcctcgatgcgttgccgctgggcggcctgcgcggccttcaacttctccaccaggtcatcacccagcgccgcgccgatttgtaccgggccggatggtttgcgaccgctcacgccgattcctcgggcttgggggttccagtgccattgcagggccggcagacaacccagccgcttacgcctggccaaccgcccgttcctccacacatggggcattccacggcgtcggtgcctggttgttcttgattttccatgccgcctcctttagccgctaaaattcatctactcatttattcatttgctcatttactctggtagctgcgcgatgtattcagatagcagctcggtaatggtcttgccttggcgtaccgcgtacatcttcagcttggtgtgatcctccgccggcaactgaaagttgacccgcttcatggctggcgtgtctgccaggctggccaacgttgcagccttgctgctgcgtgcgctcggacggccggcacttagcgtgtttgtgcttttgctcattttctctttacctcattaactcaaatgagttttgatttaatttcagcggccagcgcctggacctcgcgggcagcgtcgccctcgggttctgattcaagaacggttgtgccggcggcggcagtgcctgggtagctcacgcgctgcgtgatacgggactcaagaatgggcagctcgtacccggccagcgcctcggcaacctcaccgccgatgcgcgtgcctttgatcgcccgcgacacgacaaaggccgcttgtagccttccatccgtgacctcaatgcgctgcttaaccagctccaccaggtcggcggtggcccatatgtcgtaagggcttggctgcaccggaatcagcacgaagtcggctgccttgatcgcggacacagccaagtccgccgcctggggcgctccgtcgatcactacgaagtcgcgccggccgatggccttcacgtcgcggtcaatcgtcgggcggtcgatgccgacaacggttagcggttgatcttcccgcacggccgcccaatcgcgggcactgccctggggatcggaatcgactaacagaacatcggccccggcgagttgcagggcgcgggctagatgggttgcgatggtcgtcttgcctgacccgcctttctggttaagtacagcgataaccttcatgcgttccccttgcgtatttgtttatttactcatcgcatcatatacgcagcgaccgcatgacgcaagctgttttactcaaatacacatcacctttttagacggcggcgctcggtttcttcagcggccaagctggccggccaggccgccagcttggcatcagacaaaccggccaggatttcatgcagccgcacggttgagacgtgcgcgggcggctcgaacacgtacccggccgcgatcatctccgcctcgatctcttcggtaatgaaaaacggttcgtcctggccgtcctggtgcggtttcatgcttgttcctcttggcgttcattctcggcggccgccagggcgtcggcctcggtcaatgcgtcctcacggaaggcaccgcgccgcctggcctcggtgggcgtcacttcctcgctgcgctcaagtgcgcggtacagggtcgagcgatgcacgccaagcagtgcagccgcctctttcacggtgcggccttcctggtcgatcagctcgcgggcgtgcgcgatctgtgccggggtgagggtagggcgggggccaaacttcacgcctcgggccttggcggcctcgcgcccgctccgggtgcggtcgatgattagggaacgctcgaactcggcaatgccggcgaacacggtcaacaccatgcggccggccggcgtggtggtgtcggcccacggctctgccaggctacgcaggcccgcgccggcctcctggatgcgctcggcaatgtccagtaggtcgcgggtgctgcgggccaggcggtctagcctggtcactgtcacaacgtcgccagggcgtaggtggtcaagcatcctggccagctccgggcggtcgcgcctggtgccggtgatcttctcggaaaacagcttggtgcagccggccgcgtgcagttcggcccgttggttggtcaagtcctggtcgtcggtgctgacgcgggcatagcccagcaggccagcggcggcgctcttgttcatggcgtaatgtctccggttctagtcgcaagtattctactttatgcgactaaaacacgcgacaagaaaacgccaggaaaagggcagggcggcagcctgtcgcgtaacttaggacttgtgcgacatgtcgttttcagaagacggctgcactgaacgtcagaagccgactgcactatagcagcggaggggttggatcaaagtactttgatcccgaggggaaccctgtggttggcatgcacatacaaatggacgaacggataaaccttttcacgcccttttaaatatccgattattctaataaacgctcttttctcttag

SEQ ID NO: 16 - DNA, 11376 bp, Artificial Sequence
  Synthetic DNA vector
gtttacccgccaatatatcctgtcaaacactgatagtttaaactgaaggcgggaaacgacaatctgatccaagctcaagctgctctagcattcgccattcaggctgcgcaactgttgggaagggcgatcggtgcgggcctcttcgctattacgccagctggcgaaagggggatgtgctgcaaggcgattaagttgggtaacgccagggttttcccagtcacgacgttgtaaaacgacggccagtgccaagcttattaccctgttatccctaaccggtgcgtttttatgcttgtagtattgtataatgtttttaagatcccctgcaggcacgtaataagtgtgcgttgaatttattcgcaaaaacattgcatattttcggcaaagtaaaattttgttgcataccttatcaaaaaataagtgctgcatactttttagagaaaccaaataattttttattgcatacccgtttttaataaaatacattgcataccctcttttaataaaaaatattgcatactttgacgaaacaaattttcgttgcatacccaataaaagattattatattgcatacccgtttttaataaaatacattgcataccctcttttaataaaaaatattgcatacgttgacgaaacaaattttcgttgcatacccaataaaagattattatattgcataccttttcttgccataccatttagccgatcaattgtgctcggcatctagagttatcaacaagtttgtacaaaaaagctgaacgagaaacgtaaaatgatataaatatcaatatattaaattagattttgcataaaaaacagactacataatactgtaaaacacaacatatccagtcactatggcggcccctcgaggggccgcattaggcaccccaggctttacactttatgcttccggctcgtataatgtgtggattttgagttaggatccggcgagattttcaggagctaaggaagctaaaatggagaaaaaaatcactggatataccaccgttgatatatcccaatggcatcgtaaagaacattttgaggcatttcagtcagttgctcaatgtacctataaccagaccgttcagctggatattacggcctttttaaagaccgtaaagaaaaataagcacaagttttatccggcctttattcacattcttgcccgcctgatgaatgctcatccggaattccgtatggcaatgaaagacggtgagctggtgatatgggatagtgttcacccttgttacaccgttttccatgagcaaactgaaacgttttcatcgctctggagtgaataccacgacgatttccggcagtttctacacatatattcgcaagatgtggcgtgttacggtgaaaacctggcctatttccctaaagggtttattgagaatatgtttttcgtctcagccaatccctgggtgagtttcaccagttttgatttaaacgtggccaatatggacaacttcttcgcccccgttttcaccatgggcaaatattatacgcaaggcgacaaggtgctgatgccgctggcgattcaggttcatcatgccgtctgtgatggcttccatgtcggcagaatgcttaatgaattacaacagtactgcgatgagtggcagggcggggcgtaaagatctggatccggcttactaaaagccagataacagtatgcgtatttgcgcgctgatttttgcggtataagaatatatactgatatgtatacccgaagtatgtcaaaaagaggtgtgctatgaagcagcgtattacagtgacagttgacagcgacagctatcagttgctcaaggcatatatgatgtcaatatctccggtctggtaagcacaaccatgcagaatgaagcccgtcgtctgcgtgccgaacgctggaaagcggaaaatcaggaagggatggctgaggtcgcccggtttattgaaatgaacggctcttttgctgacgagaacagggactggtgaaatgcagtttaaggtttacacctataaaagagagagccgttatcgtctgtttgtggatgtacagagtgatattattgacacgcccgggcgacggatggtgatccccctggccagtgcacgtctgctgtcagataaagtctcccgtgaactttacccggtggtgcatatcggggatgaaagctggcgcatgatgaccaccgatatggccagtgtgccggtctccgttatcggggaagaagtggctgatctcagccaccgcgaaaatgacatcaaaaacgccattaacctgatgttctggggaatataaatgtcaggctcccttatacacagccagtctgcaggtcgaccatagtgactggatatgttgtgttttacagtattatgtagtctgttttttatgcaaaatctaatttaatatattgatatttatatcattttacgtttctcgttcagctttcttgtacaaagtggttgataacagcgcttagagctctgccgagcacaattgatcggctaaatggtatggcaagaaaaggtatgcaatataataatcttttattgggtatgcaacgaaaatttgtttcgtcaacgtatgcaatattttttattaaaagagggtatgcaatgtattttattaaaaacgggtatgcaatataataatcttttattgggtatgcaacgaaaatttgtttcgtcaaagtatgcaatattttttattaaaagagggtatgcaatgtattttattaaaaacgggtatgcaataaaaaattatttggtttctctaaaaagtatgcagcacttattttttgataaggtatgcaacaaaattttactttgccgaaaatatgcaatgtttttgcgaataaattcaacgcacacttattacgtgggcgcgccttaattaaattaatggtaccggtctaatacccaatctctcgtcttatccagatgttttatacgccttaattaatagggataacagggtaatactagtggcgcgcctatttctgaattcccgatctagtaacatagatgacaccgcgcgcgataatttatcctagtttgcgcgctatattttgttttctatcgcgtattaaatgtataattgcgggactctaatcataaaaacccatctcataaataacgtcatgcattacatgttaattattacatgcttaacgtaattcaacagaaattatatgataatcatcgcaagaccggcaacaggattcaatcttaagaaactttattgccaaatgtttgaacgatcggggatcatccgggtctgtggcgggaactccacgaaaatatccgaacgcagcaagatatcgcggtgcatctcggtcttgcctgggcagtcgccgccgacgccgttgatgtggacgccgggcccgatcatattgtcgctcaggatcgtggcgttgtgcttgtcggccgttgctgtcgtaatgatatcggcaccttcgaccgcctgttccgcagagatcccgtgggcgaagaactccagcatgagatccccgcgctggaggatcatccagccggcgtcccggaaaacgattccgaagcccaacctttcatagaaggcggcggtggaatcgaaatctcgtgatggcaggttgggcgtcgcttggtcggtcatttcgaaccccagagtcccgctcagaagaactcgtcaagaaggcgatagaaggcgatgcgctgcgaatcgggagcggcgataccgtaaagcacgaggaagcggtcagcccattcgccgccaagctcttcagcaatatcacgggtagccaacgctatgtcctgatagcggtccgccacacccagccggccacagtcgatgaatccagaaaagcggccattttccaccatgatattcggcaagcaggcatcgccatgggtcacgacgagatcatcgccgtcgggcatgcgcgccttgagcctggcgaacagttcggctggcgcgagcccctgatgctcttcgtccagatcatcctgatcgacaagaccggcttccatccgagtacgtgctcgctcgatgcgatgtttcgcttggtggtcgaatgggcaggtagccggatcaagcgtatgcagccgccgcattgcatcagccatgatggatactttctcggcaggagcaaggtgagatgacaggagatcctgccccggcacttcgcccaatagcagccagtcccttcccgcttcagtgacaacgtcgagcacagctgcgcaaggaacgcccgtcgtggccagccacgatagccgcgctgcctcgtcctgcagttcattcagggcaccggacaggtcggtcttgacaaaaagaaccgggcgcccctgcgctgacagccggaacacggcggcatcagagcagccgattgtctgttgtgcccagtcatagccgaatagcctctccacccaagcggccggagaacctgcgtgcaatccatcttgttcaatcatgcgaaacgatccagatccggtgcagattatttggattgagagtgaatatgagactctaattggataccgaggggaatttatggaacgtcagtggagcatttttgacaagaaatatttgctagctgatagtgaccttaggcgacttttgaacgcgcaataatggtttctgacgtatgtgcttagctcattaaactccagaaacccgcggctgagtggctccttcaacgttgcggttctgtcagttccaaacgtaaaacggcttgtcccgcgtcatcggcgggggtcataacgtgactcccttaattctccgctcatgatgaattcagaaataaattcagcctaattcggcgttaattcagtacattaaaaacgtccgcaatgtgttattaagttgtctaagcgtcaatttgtttacaccacaatatatcctgccaccagccagccaacagctccccgaccggcagctcggcacaaaatcaccactcgatacaggcagcccatcagtccgggacggcgtcagcgggagagccgttgtaaggcggcagactttgctcatgttaccgatgctattcggaagaacggcaactaagctgccgggtttgaaacacggatgatctcgcggagggtagcatgttgattgtaacgatgacagagcgttgctgcctgtgatcaattcgggcacgaacccagtggacataagcctgttcggttcgtaagctgtaatgcaagtagcgtatgcgctcacgcaactggtccagaaccttgaccgaacgcagcggtggtaacggcgcagtggcggttttcatggcttgttatgactgtttttttggggtacagtctatgcctcgggcatccaagcagcaagcgcgttacgccgtgggtcgatgtttgatgttatggagcagcaacgatgttacgcagcagggcagtcgccctaaaacaaagttaaacatcatgggggaagcggtgatcgccgaagtatcgactcaactatcagaggtagttggcgtcatcgagcgccatctcgaaccgacgttgctggccgtacatttgtacggctccgcagtggatggcggcctgaagccacacagtgatattgatttgctggttacggtgaccgtaaggcttgatgaaacaacgcggcgagctttgatcaacgaccttttggaaacttcggcttcccctggagagagcgagattctccgcgctgtagaagtcaccattgttgtgcacgacgacatcattccgtggcgttatccagctaagcgcgaactgcaatttggagaatggcagcgcaatgacattcttgcaggtatcttcgagccagccacgatcgacattgatctggctatcttgctgacaaaagcaagagaacatagcgttgccttggtaggtccagcggcggaggaactctttgatccggttcctgaacaggatctatttgaggcgctaaatgaaaccttaacgctatggaactcgccgcccgactgggctggcgatgagcgaaatgtagtgcttacgttgtcccgcatttggtacagcgcagtaaccggcaaaatcgcgccgaaggatgtcgctgccgactgggcaatggagcgcctgccggcccagtatcagcccgtcatacttgaagctagacaggcttatcttggacaagaagaagatcgcttggcctcgcgcgcagatcagttggaagaatttgtccactacgtgaaaggcgagatcaccaaggtagtcggcaaataatgtctagctagaaattcgttcaagccgacgccgcttcgcggcgcggcttaactcaagcgttagatgcactaagcacataattgctcacagccaaactatcaggtcaagtctgcttttattatttttaagcgtgcataataagccctacacaaattgggagatatatcatgcatgaccaaaatcccttaacgtgagttttcgttccactgagcgtcagaccccgtagaaaagatcaaaggatcttcttgagatcctttttttctgcgcgtaatctgctgcttgcaaacaaaaaaaccaccgctaccagcggtggtttgtttgccggatcaagagctaccaactctttttccgaaggtaactggcttcagcagagcgcagataccaaatactgtccttctagtgtagccgtagttaggccaccacttcaagaactctgtagcaccgcctacatacctcgctctgctaatcctgttaccagtggctgctgccagtggcgataagtcgtgtcttaccgggttggactcaagacgatagttaccggataaggcgcagcggtcgggctgaacggggggttcgtgcacacagcccagcttggagcgaacgacctacaccgaactgagatacctacagcgtgagctatgagaaagcgccacgcttcccgaagggagaaaggcggacaggtatccggtaagcggcagggtcggaacaggagagcgcacgagggagcttccagggggaaacgcctggtatctttatagtcctgtcgggtttcgccacctctgacttgagcgtcgatttttgtgatgctcgtcaggggggcggagcctatggaaaaacgccagcaacgcggcctttttacggttcctggccttttgctggccttttgctcacatgttctttcctgcgttatcccctgattctgtggataaccgtattaccgcctttgagtgagctgataccgctcgccgcagccgaacgaccgagcgcagcgagtcagtgagcgaggaagcggaagagcgcctgatgcggtattttctccttacgcatctgtgcggtatttcacaccgcatatggtgcactctcagtacaatctgctctgatgccgcatagttaagccagtatacactccgctatcgctacgtgactgggtcatggctgcgccccgacacccgccaacacccgctgacgcgccctgacgggcttgtctgctcccggcatccgcttacagacaagctgtgaccgtctccgggagctgcatgtgtcagaggttttcaccgtcatcaccgaaacgcgcgaggcagggtgccttgatgtgggcgccggcggtcgagtggcgacggcgcggcttgtccgcgccctggtagattgcctggccgtaggccagccatttttgagcggccagcggccgcgataggccgacgcgaagcggcggggcgtagggagcgcagcgaccgaagggtaggcgctttttgcagctcttcggctgtgcgctggccagacagttatgcacaggccaggcgggttttaagagttttaataagttttaaagagttttaggcggaaaaatcgccttttttctcttttatatcagtcacttacatgtgtgaccggttcccaatgtacggctttgggttcccaatgtacgggttccggttcccaatgtacggctttgggttcccaatgtacgtgctatccacaggaaagagaccttttcgacctttttcccctgctagggcaatttgccctagcatctgctccgtacattaggaaccggcggatgcttcgccctcgatcaggttgcggtagcgcatgactaggatcgggccagcctgccccgcctcctccttcaaatcgtactccggcaggtcatttgacccgatcagcttgcgcacggtgaaacagaacttcttgaactctccggcgctgccactgcgttcgtagatcgtcttgaacaaccatctggcttctgccttgcctgcggcgcggcgtgccaggcggtagagaaaacggccgatgccgggatcgatcaaaaagtaatcggggtgaaccgtcagcacgtccgggttcttgccttctgtgatctcgcggtacatccaatcagctagctcgatctcgatgtactccggccgcccggtttcgctctttacgatcttgtagcggctaatcaaggcttcaccctcggataccgtcaccaggcggccgttcttggccttcttcgtacgctgcatggcaacgtgcgtggtgtttaaccgaatgcaggtttctaccaggtcgtctttctgctttccgccatcggctcgccggcagaacttgagtacgtccgcaacgtgtggacggaacacgcggccgggcttgtctcccttcccttcccggtatcggttcatggattcggttagatgggaaaccgccatcagtaccaggtcgtaatcccacacactggccatgccggccggccctgcggaaacctctacgtgcccgtctggaagctcgtagcggatcacctcgccagctcgtcggtcacgcttcgacagacggaaaacggccacgtccatgatgctgcgactatcgcgggtgcccacgtcatagagcatcggaacgaaaaaatctggttgctcgtcgcccttgggcggcttcctaatcgacggcgcaccggctgccggcggttgccgggattctttgcggattcgatcagcggccgcttgccacgattcaccggggcgtgcttctgcctcgatgcgttgccgctgggcggcctgcgcggccttcaacttctccaccaggtcatcacccagcgccgcgccgatttgtaccgggccggatggtttgcgaccgctcacgccgattcctcgggcttgggggttccagtgccattgcagggccggcagacaacccagccgcttacgcctggccaaccgcccgttcctccacacatggggcattccacggcgtcggtgcctggttgttcttgattttccatgccgcctcctttagccgctaaaattcatctactcatttattcatttgctcatttactctggtagctgcgcgatgtattcagatagcagctcggtaatggtcttgccttggcgtaccgcgtacatcttcagcttggtgtgatcctccgccggcaactgaaagttgacccgcttcatggctggcgtgtctgccaggctggccaacgttgcagccttgctgctgcgtgcgctcggacggccggcacttagcgtgtttgtgcttttgctcattttctctttacctcattaactcaaatgagttttgatttaatttcagcggccagcgcctggacctcgcgggcagcgtcgccctcgggttctgattcaagaacggttgtgccggcggcggcagtgcctgggtagctcacgcgctgcgtgatacgggactcaagaatgggcagctcgtacccggccagcgcctcggcaacctcaccgccgatgcgcgtgcctttgatcgcccgcgacacgacaaaggccgcttgtagccttccatccgtgacctcaatgcgctgcttaaccagctccaccaggtcggcggtggcccatatgtcgtaagggcttggctgcaccggaatcagcacgaagtcggctgccttgatcgcggacacagccaagtccgccgcctggggcgctccgtcgatcactacgaagtcgcgccggccgatggccttcacgtcgcggtcaatcgtcgggcggtcgatgccgacaacggttagcggttgatcttcccgcacggccgcccaatcgcgggcactgccctggggatcggaatcgactaacagaacatcggccccggcgagttgcagggcgcgggctagatgggttgcgatggtcgtcttgcctgacccgcctttctggttaagtacagcgataaccttcatgcgttccccttgcgtatttgtttatttactcatcgcatcatatacgcagcgaccgcatgacgcaagctgttttactcaaatacacatcacctttttagacggcggcgctcggtttcttcagcggccaagctggccggccaggccgccagcttggcatcagacaaaccggccaggatttcatgcagccgcacggttgagacgtgcgcgggcggctcgaacacgtacccggccgcgatcatctccgcctcgatctcttcggtaatgaaaaacggttcgtcctggccgtcctggtgcggtttcatgcttgttcctcttggcgttcattctcggcggccgccagggcgtcggcctcggtcaatgcgtcctcacggaaggcaccgcgccgcctggcctcggtgggcgtcacttcctcgctgcgctcaagtgcgcggtacagggtcgagcgatgcacgccaagcagtgcagccgcctctttcacggtgcggccttcctggtcgatcagctcgcgggcgtgcgcgatctgtgccggggtgagggtagggcgggggccaaacttcacgcctcgggccttggcggcctcgcgcccgctccgggtgcggtcgatgattagggaacgctcgaactcggcaatgccggcgaacacggtcaacaccatgcggccggccggcgtggtggtgtcggcccacggctctgccaggctacgcaggcccgcgccggcctcctggatgcgctcggcaatgtccagtaggtcgcgggtgctgcgggccaggcggtctagcctggtcactgtcacaacgtcgccagggcgtaggtggtcaagcatcctggccagctccgggcggtcgcgcctggtgccggtgatcttctcggaaaacagcttggtgcagccggccgcgtgcagttcggcccgttggttggtcaagtcctggtcgtcggtgctgacgcgggcatagcccagcaggccagcggcggcgctcttgttcatggcgtaatgtctccggttctagtcgcaagtattctactttatgcgactaaaacacgcgacaagaaaacgccaggaaaagggcagggcggcagcctgtcgcgtaacttaggacttgtgcgacatgtcgttttcagaagacggctgcactgaacgtcagaagccgactgcactatagcagcggaggggttggatcaaagtactttgatcccgaggggaaccctgtggttggcatgcacatacaaatggacgaacggataaaccttttcacgcccttttaaatatccgattattctaataaacgctcttttctcttag

SEQ ID NO: 17 - DNA, 11376 bp, Artificial Sequence
  Synthetic DNA vector
gtttacccgccaatatatcctgtcaaacactgatagtttaaactgaaggcgggaaacgacaatctgatccaagctcaagctgctctagcattcgccattcaggctgcgcaactgttgggaagggcgatcggtgcgggcctcttcgctattacgccagctggcgaaagggggatgtgctgcaaggcgattaagttgggtaacgccagggttttcccagtcacgacgttgtaaaacgacggccagtgccaagcttattaccctgttatccctaaccggtctaatacccaatctctcgtcttatccagatgttttatacgcccctgcaggcacgtaataagtgtgcgttgaatttattcgcaaaaacattgcatattttcggcaaagtaaaattttgttgcataccttatcaaaaaataagtgctgcatactttttagagaaaccaaataattttttattgcatacccgtttttaataaaatacattgcataccctcttttaataaaaaatattgcatactttgacgaaacaaattttcgttgcatacccaataaaagattattatattgcatacccgtttttaataaaatacattgcataccctcttttaataaaaaatattgcatacgttgacgaaacaaattttcgttgcatacccaataaaagattattatattgcataccttttcttgccataccatttagccgatcaattgtgctcggcatctagagttatcaacaagtttgtacaaaaaagctgaacgagaaacgtaaaatgatataaatatcaatatattaaattagattttgcataaaaaacagactacataatactgtaaaacacaacatatccagtcactatggcggcccctcgaggggccgcattaggcaccccaggctttacactttatgcttccggctcgtataatgtgtggattttgagttaggatccggcgagattttcaggagctaaggaagctaaaatggagaaaaaaatcactggatataccaccgttgatatatcccaatggcatcgtaaagaacattttgaggcatttcagtcagttgctcaatgtacctataaccagaccgttcagctggatattacggcctttttaaagaccgtaaagaaaaataagcacaagttttatccggcctttattcacattcttgcccgcctgatgaatgctcatccggaattccgtatggcaatgaaagacggtgagctggtgatatgggatagtgttcacccttgttacaccgttttccatgagcaaactgaaacgttttcatcgctctggagtgaataccacgacgatttccggcagtttctacacatatattcgcaagatgtggcgtgttacggtgaaaacctggcctatttccctaaagggtttattgagaatatgtttttcgtctcagccaatccctgggtgagtttcaccagttttgatttaaacgtggccaatatggacaacttcttcgcccccgttttcaccatgggcaaatattatacgcaaggcgacaaggtgctgatgccgctggcgattcaggttcatcatgccgtctgtgatggcttccatgtcggcagaatgcttaatgaattacaacagtactgcgatgagtggcagggcggggcgtaaagatctggatccggcttactaaaagccagataacagtatgcgtatttgcgcgctgatttttgcggtataagaatatatactgatatgtatacccgaagtatgtcaaaaagaggtgtgctatgaagcagcgtattacagtgacagttgacagcgacagctatcagttgctcaaggcatatatgatgtcaatatctccggtctggtaagcacaaccatgcagaatgaagcccgtcgtctgcgtgccgaacgctggaaagcggaaaatcaggaagggatggctgaggtcgcccggtttattgaaatgaacggctcttttgctgacgagaacagggactggtgaaatgcagtttaaggtttacacctataaaagagagagccgttatcgtctgtttgtggatgtacagagtgatattattgacacgcccgggcgacggatggtgatccccctggccagtgcacgtctgctgtcagataaagtctcccgtgaactttacccggtggtgcatatcggggatgaaagctggcgcatgatgaccaccgatatggccagtgtgccggtctccgttatcggggaagaagtggctgatctcagccaccgcgaaaatgacatcaaaaacgccattaacctgatgttctggggaatataaatgtcaggctcccttatacacagccagtctgcaggtcgaccatagtgactggatatgttgtgttttacagtattatgtagtctgttttttatgcaaaatctaatttaatatattgatatttatatcattttacgtttctcgttcagctttcttgtacaaagtggttgataacagcgcttagagctctgccgagcacaattgatcggctaaatggtatggcaagaaaaggtatgcaatataataatcttttattgggtatgcaacgaaaatttgtttcgtcaacgtatgcaatattttttattaaaagagggtatgcaatgtattttattaaaaacgggtatgcaatataataatcttttattgggtatgcaacgaaaatttgtttcgtcaaagtatgcaatattttttattaaaagagggtatgcaatgtattttattaaaaacgggtatgcaataaaaaattatttggtttctctaaaaagtatgcagcacttattttttgataaggtatgcaacaaaattttactttgccgaaaatatgcaatgtttttgcgaataaattcaacgcacacttattacgtgggcgcgccttaattaaattaatggtaccggtgaattcccttatgtgagtgtaaaaggcaggcgagtttgtcccttaattaatagggataacagggtaatactagtggcgcgcctatttctgaattcccgatctagtaacatagatgacaccgcgcgcgataatttatcctagtttgcgcgctatattttgttttctatcgcgtattaaatgtataattgcgggactctaatcataaaaacccatctcataaataacgtcatgcattacatgttaattattacatgcttaacgtaattcaacagaaattatatgataatcatcgcaagaccggcaacaggattcaatcttaagaaactttattgccaaatgtttgaacgatcggggatcatccgggtctgtggcgggaactccacgaaaatatccgaacgcagcaagatatcgcggtgcatctcggtcttgcctgggcagtcgccgccgacgccgttgatgtggacgccgggcccgatcatattgtcgctcaggatcgtggcgttgtgcttgtcggccgttgctgtcgtaatgatatcggcaccttcgaccgcctgttccgcagagatcccgtgggcgaagaactccagcatgagatccccgcgctggaggatcatccagccggcgtcccggaaaacgattccgaagcccaacctttcatagaaggcggcggtggaatcgaaatctcgtgatggcaggttgggcgtcgcttggtcggtcatttcgaaccccagagtcccgctcagaagaactcgtcaagaaggcgatagaaggcgatgcgctgcgaatcgggagcggcgataccgtaaagcacgaggaagcggtcagcccattcgccgccaagctcttcagcaatatcacgggtagccaacgctatgtcctgatagcggtccgccacacccagccggccacagtcgatgaatccagaaaagcggccattttccaccatgatattcggcaagcaggcatcgccatgggtcacgacgagatcatcgccgtcgggcatgcgcgccttgagcctggcgaacagttcggctggcgcgagcccctgatgctcttcgtccagatcatcctgatcgacaagaccggcttccatccgagtacgtgctcgctcgatgcgatgtttcgcttggtggtcgaatgggcaggtagccggatcaagcgtatgcagccgccgcattgcatcagccatgatggatactttctcggcaggagcaaggtgagatgacaggagatcctgccccggcacttcgcccaatagcagccagtcccttcccgcttcagtgacaacgtcgagcacagctgcgcaaggaacgcccgtcgtggccagccacgatagccgcgctgcctcgtcctgcagttcattcagggcaccggacaggtcggtcttgacaaaaagaaccgggcgcccctgcgctgacagccggaacacggcggcatcagagcagccgattgtctgttgtgcccagtcatagccgaatagcctctccacccaagcggccggagaacctgcgtgcaatccatcttgttcaatcatgcgaaacgatccagatccggtgcagattatttggattgagagtgaatatgagactctaattggataccgaggggaatttatggaacgtcagtggagcatttttgacaagaaatatttgctagctgatagtgaccttaggcgacttttgaacgcgcaataatggtttctgacgtatgtgcttagctcattaaactccagaaacccgcggctgagtggctccttcaacgttgcggttctgtcagttccaaacgtaaaacggcttgtcccgcgtcatcggcgggggtcataacgtgactcccttaattctccgctcatgatgaattcagaaataaattcagcctaattcggcgttaattcagtacattaaaaacgtccgcaatgtgttattaagttgtctaagcgtcaatttgtttacaccacaatatatcctgccaccagccagccaacagctccccgaccggcagctcggcacaaaatcaccactcgatacaggcagcccatcagtccgggacggcgtcagcgggagagccgttgtaaggcggcagactttgctcatgttaccgatgctattcggaagaacggcaactaagctgccgggtttgaaacacggatgatctcgcggagggtagcatgttgattgtaacgatgacagagcgttgctgcctgtgatcaattcgggcacgaacccagtggacataagcctgttcggttcgtaagctgtaatgcaagtagcgtatgcgctcacgcaactggtccagaaccttgaccgaacgcagcggtggtaacggcgcagtggcggttttcatggcttgttatgactgtttttttggggtacagtctatgcctcgggcatccaagcagcaagcgcgttacgccgtgggtcgatgtttgatgttatggagcagcaacgatgttacgcagcagggcagtcgccctaaaacaaagttaaacatcatgggggaagcggtgatcgccgaagtatcgactcaactatcagaggtagttggcgtcatcgagcgccatctcgaaccgacgttgctggccgtacatttgtacggctccgcagtggatggcggcctgaagccacacagtgatattgatttgctggttacggtgaccgtaaggcttgatgaaacaacgcggcgagctttgatcaacgaccttttggaaacttcggcttcccctggagagagcgagattctccgcgctgtagaagtcaccattgttgtgcacgacgacatcattccgtggcgttatccagctaagcgcgaactgcaatttggagaatggcagcgcaatgacattcttgcaggtatcttcgagccagccacgatcgacattgatctggctatcttgctgacaaaagcaagagaacatagcgttgccttggtaggtccagcggcggaggaactctttgatccggttcctgaacaggatctatttgaggcgctaaatgaaaccttaacgctatggaactcgccgcccgactgggctggcgatgagcgaaatgtagtgcttacgttgtcccgcatttggtacagcgcagtaaccggcaaaatcgcgccgaaggatgtcgctgccgactgggcaatggagcgcctgccggcccagtatcagcccgtcatacttgaagctagacaggcttatcttggacaagaagaagatcgcttggcctcgcgcgcagatcagttggaagaatttgtccactacgtgaaaggcgagatcaccaaggtagtcggcaaataatgtctagctagaaattcgttcaagccgacgccgcttcgcggcgcggcttaactcaagcgttagatgcactaagcacataattgctcacagccaaactatcaggtcaagtctgcttttattatttttaagcgtgcataataagccctacacaaattgggagatatatcatgcatgaccaaaatcccttaacgtgagttttcgttccactgagcgtcagaccccgtagaaaagatcaaaggatcttcttgagatcctttttttctgcgcgtaatctgctgcttgcaaacaaaaaaaccaccgctaccagcggtggtttgtttgccggatcaagagctaccaactctttttccgaaggtaactggcttcagcagagcgcagataccaaatactgtccttctagtgtagccgtagttaggccaccacttcaagaactctgtagcaccgcctacatacctcgctctgctaatcctgttaccagtggctgctgccagtggcgataagtcgtgtcttaccgggttggactcaagacgatagttaccggataaggcgcagcggtcgggctgaacggggggttcgtgcacacagcccagcttggagcgaacgacctacaccgaactgagatacctacagcgtgagctatgagaaagcgccacgcttcccgaagggagaaaggcggacaggtatccggtaagcggcagggtcggaacaggagagcgcacgagggagcttccagggggaaacgcctggtatctttatagtcctgtcgggtttcgccacctctgacttgagcgtcgatttttgtgatgctcgtcaggggggcggagcctatggaaaaacgccagcaacgcggcctttttacggttcctggccttttgctggccttttgctcacatgttctttcctgcgttatcccctgattctgtggataaccgtattaccgcctttgagtgagctgataccgctcgccgcagccgaacgaccgagcgcagcgagtcagtgagcgaggaagcggaagagcgcctgatgcggtattttctccttacgcatctgtgcggtatttcacaccgcatatggtgcactctcagtacaatctgctctgatgccgcatagttaagccagtatacactccgctatcgctacgtgactgggtcatggctgcgccccgacacccgccaacacccgctgacgcgccctgacgggcttgtctgctcccggcatccgcttacagacaagctgtgaccgtctccgggagctgcatgtgtcagaggttttcaccgtcatcaccgaaacgcgcgaggcagggtgccttgatgtgggcgccggcggtcgagtggcgacggcgcggcttgtccgcgccctggtagattgcctggccgtaggccagccatttttgagcggccagcggccgcgataggccgacgcgaagcggcggggcgtagggagcgcagcgaccgaagggtaggcgctttttgcagctcttcggctgtgcgctggccagacagttatgcacaggccaggcgggttttaagagttttaataagttttaaagagttttaggcggaaaaatcgccttttttctcttttatatcagtcacttacatgtgtgaccggttcccaatgtacggctttgggttcccaatgtacgggttccggttcccaatgtacggctttgggttcccaatgtacgtgctatccacaggaaagagaccttttcgacctttttcccctgctagggcaatttgccctagcatctgctccgtacattaggaaccggcggatgcttcgccctcgatcaggttgcggtagcgcatgactaggatcgggccagcctgccccgcctcctccttcaaatcgtactccggcaggtcatttgacccgatcagcttgcgcacggtgaaacagaacttcttgaactctccggcgctgccactgcgttcgtagatcgtcttgaacaaccatctggcttctgccttgcctgcggcgcggcgtgccaggcggtagagaaaacggccgatgccgggatcgatcaaaaagtaatcggggtgaaccgtcagcacgtccgggttcttgccttctgtgatctcgcggtacatccaatcagctagctcgatctcgatgtactccggccgcccggtttcgctctttacgatcttgtagcggctaatcaaggcttcaccctcggataccgtcaccaggcggccgttcttggccttcttcgtacgctgcatggcaacgtgcgtggtgtttaaccgaatgcaggtttctaccaggtcgtctttctgctttccgccatcggctcgccggcagaacttgagtacgtccgcaacgtgtggacggaacacgcggccgggcttgtctcccttcccttcccggtatcggttcatggattcggttagatgggaaaccgccatcagtaccaggtcgtaatcccacacactggccatgccggccggccctgcggaaacctctacgtgcccgtctggaagctcgtagcggatcacctcgccagctcgtcggtcacgcttcgacagacggaaaacggccacgtccatgatgctgcgactatcgcgggtgcccacgtcatagagcatcggaacgaaaaaatctggttgctcgtcgcccttgggcggcttcctaatcgacggcgcaccggctgccggcggttgccgggattctttgcggattcgatcagcggccgcttgccacgattcaccggggcgtgcttctgcctcgatgcgttgccgctgggcggcctgcgcggccttcaacttctccaccaggtcatcacccagcgccgcgccgatttgtaccgggccggatggtttgcgaccgctcacgccgattcctcgggcttgggggttccagtgccattgcagggccggcagacaacccagccgcttacgcctggccaaccgcccgttcctccacacatggggcattccacggcgtcggtgcctggttgttcttgattttccatgccgcctcctttagccgctaaaattcatctactcatttattcatttgctcatttactctggtagctgcgcgatgtattcagatagcagctcggtaatggtcttgccttggcgtaccgcgtacatcttcagcttggtgtgatcctccgccggcaactgaaagttgacccgcttcatggctggcgtgtctgccaggctggccaacgttgcagccttgctgctgcgtgcgctcggacggccggcacttagcgtgtttgtgcttttgctcattttctctttacctcattaactcaaatgagttttgatttaatttcagcggccagcgcctggacctcgcgggcagcgtcgccctcgggttctgattcaagaacggttgtgccggcggcggcagtgcctgggtagctcacgcgctgcgtgatacgggactcaagaatgggcagctcgtacccggccagcgcctcggcaacctcaccgccgatgcgcgtgcctttgatcgcccgcgacacgacaaaggccgcttgtagccttccatccgtgacctcaatgcgctgcttaaccagctccaccaggtcggcggtggcccatatgtcgtaagggcttggctgcaccggaatcagcacgaagtcggctgccttgatcgcggacacagccaagtccgccgcctggggcgctccgtcgatcactacgaagtcgcgccggccgatggccttcacgtcgcggtcaatcgtcgggcggtcgatgccgacaacggttagcggttgatcttcccgcacggccgcccaatcgcgggcactgccctggggatcggaatcgactaacagaacatcggccccggcgagttgcagggcgcgggctagatgggttgcgatggtcgtcttgcctgacccgcctttctggttaagtacagcgataaccttcatgcgttccccttgcgtatttgtttatttactcatcgcatcatatacgcagcgaccgcatgacgcaagctgttttactcaaatacacatcacctttttagacggcggcgctcggtttcttcagcggccaagctggccggccaggccgccagcttggcatcagacaaaccggccaggatttcatgcagccgcacggttgagacgtgcgcgggcggctcgaacacgtacccggccgcgatcatctccgcctcgatctcttcggtaatgaaaaacggttcgtcctggccgtcctggtgcggtttcatgcttgttcctcttggcgttcattctcggcggccgccagggcgtcggcctcggtcaatgcgtcctcacggaaggcaccgcgccgcctggcctcggtgggcgtcacttcctcgctgcgctcaagtgcgcggtacagggtcgagcgatgcacgccaagcagtgcagccgcctctttcacggtgcggccttcctggtcgatcagctcgcgggcgtgcgcgatctgtgccggggtgagggtagggcgggggccaaacttcacgcctcgggccttggcggcctcgcgcccgctccgggtgcggtcgatgattagggaacgctcgaactcggcaatgccggcgaacacggtcaacaccatgcggccggccggcgtggtggtgtcggcccacggctctgccaggctacgcaggcccgcgccggcctcctggatgcgctcggcaatgtccagtaggtcgcgggtgctgcgggccaggcggtctagcctggtcactgtcacaacgtcgccagggcgtaggtggtcaagcatcctggccagctccgggcggtcgcgcctggtgccggtgatcttctcggaaaacagcttggtgcagccggccgcgtgcagttcggcccgttggttggtcaagtcctggtcgtcggtgctgacgcgggcatagcccagcaggccagcggcggcgctcttgttcatggcgtaatgtctccggttctagtcgcaagtattctactttatgcgactaaaacacgcgacaagaaaacgccaggaaaagggcagggcggcagcctgtcgcgtaacttaggacttgtgcgacatgtcgttttcagaagacggctgcactgaacgtcagaagccgactgcactatagcagcggaggggttggatcaaagtactttgatcccgaggggaaccctgtggttggcatgcacatacaaatggacgaacggataaaccttttcacgcccttttaaatatccgattattctaataaacgctcttttctcttag

SEQ ID NO: 18 - DNA, 11376 bp, Artificial Sequence
  Synthetic DNA vector
gtttacccgccaatatatcctgtcaaacactgatagtttaaactgaaggcgggaaacgacaatctgatccaagctcaagctgctctagcattcgccattcaggctgcgcaactgttgggaagggcgatcggtgcgggcctcttcgctattacgccagctggcgaaagggggatgtgctgcaaggcgattaagttgggtaacgccagggttttcccagtcacgacgttgtaaaacgacggccagtgccaagcttattaccctgttatccctaaccggtgaattcccttatgtgagtgtaaaaggcaggcgagtttgtccccctgcaggcacgtaataagtgtgcgttgaatttattcgcaaaaacattgcatattttcggcaaagtaaaattttgttgcataccttatcaaaaaataagtgctgcatactttttagagaaaccaaataattttttattgcatacccgtttttaataaaatacattgcataccctcttttaataaaaaatattgcatactttgacgaaacaaattttcgttgcatacccaataaaagattattatattgcatacccgtttttaataaaatacattgcataccctcttttaataaaaaatattgcatacgttgacgaaacaaattttcgttgcatacccaataaaagattattatattgcataccttttcttgccataccatttagccgatcaattgtgctcggcatctagagttatcaacaagtttgtacaaaaaagctgaacgagaaacgtaaaatgatataaatatcaatatattaaattagattttgcataaaaaacagactacataatactgtaaaacacaacatatccagtcactatggcggcccctcgaggggccgcattaggcaccccaggctttacactttatgcttccggctcgtataatgtgtggattttgagttaggatccggcgagattttcaggagctaaggaagctaaaatggagaaaaaaatcactggatataccaccgttgatatatcccaatggcatcgtaaagaacattttgaggcatttcagtcagttgctcaatgtacctataaccagaccgttcagctggatattacggcctttttaaagaccgtaaagaaaaataagcacaagttttatccggcctttattcacattcttgcccgcctgatgaatgctcatccggaattccgtatggcaatgaaagacggtgagctggtgatatgggatagtgttcacccttgttacaccgttttccatgagcaaactgaaacgttttcatcgctctggagtgaataccacgacgatttccggcagtttctacacatatattcgcaagatgtggcgtgttacggtgaaaacctggcctatttccctaaagggtttattgagaatatgtttttcgtctcagccaatccctgggtgagtttcaccagttttgatttaaacgtggccaatatggacaacttcttcgcccccgttttcaccatgggcaaatattatacgcaaggcgacaaggtgctgatgccgctggcgattcaggttcatcatgccgtctgtgatggcttccatgtcggcagaatgcttaatgaattacaacagtactgcgatgagtggcagggcggggcgtaaagatctggatccggcttactaaaagccagataacagtatgcgtatttgcgcgctgatttttgcggtataagaatatatactgatatgtatacccgaagtatgtcaaaaagaggtgtgctatgaagcagcgtattacagtgacagttgacagcgacagctatcagttgctcaaggcatatatgatgtcaatatctccggtctggtaagcacaaccatgcagaatgaagcccgtcgtctgcgtgccgaacgctggaaagcggaaaatcaggaagggatggctgaggtcgcccggtttattgaaatgaacggctcttttgctgacgagaacagggactggtgaaatgcagtttaaggtttacacctataaaagagagagccgttatcgtctgtttgtggatgtacagagtgatattattgacacgcccgggcgacggatggtgatccccctggccagtgcacgtctgctgtcagataaagtctcccgtgaactttacccggtggtgcatatcggggatgaaagctggcgcatgatgaccaccgatatggccagtgtgccggtctccgttatcggggaagaagtggctgatctcagccaccgcgaaaatgacatcaaaaacgccattaacctgatgttctggggaatataaatgtcaggctcccttatacacagccagtctgcaggtcgaccatagtgactggatatgttgtgttttacagtattatgtagtctgttttttatgcaaaatctaatttaatatattgatatttatatcattttacgtttctcgttcagctttcttgtacaaagtggttgataacagcgcttagagctctgccgagcacaattgatcggctaaatggtatggcaagaaaaggtatgcaatataataatcttttattgggtatgcaacgaaaatttgtttcgtcaacgtatgcaatattttttattaaaagagggtatgcaatgtattttattaaaaacgggtatgcaatataataatcttttattgggtatgcaacgaaaatttgtttcgtcaaagtatgcaatattttttattaaaagagggtatgcaatgtattttattaaaaacgggtatgcaataaaaaattatttggtttctctaaaaagtatgcagcacttattttttgataaggtatgcaacaaaattttactttgccgaaaatatgcaatgtttttgcgaataaattcaacgcacacttattacgtgggcgcgccttaattaaattaatggtaccggttgcttgcaaaagcagtaattggaaagcactctcaaagaatccttaattaatagggataacagggtaatactagtggcgcgcctatttctgaattcccgatctagtaacatagatgacaccgcgcgcgataatttatcctagtttgcgcgctatattttgttttctatcgcgtattaaatgtataattgcgggactctaatcataaaaacccatctcataaataacgtcatgcattacatgttaattattacatgcttaacgtaattcaacagaaattatatgataatcatcgcaagaccggcaacaggattcaatcttaagaaactttattgccaaatgtttgaacgatcggggatcatccgggtctgtggcgggaactccacgaaaatatccgaacgcagcaagatatcgcggtgcatctcggtcttgcctgggcagtcgccgccgacgccgttgatgtggacgccgggcccgatcatattgtcgctcaggatcgtggcgttgtgcttgtcggccgttgctgtcgtaatgatatcggcaccttcgaccgcctgttccgcagagatcccgtgggcgaagaactccagcatgagatccccgcgctggaggatcatccagccggcgtcccggaaaacgattccgaagcccaacctttcatagaaggcggcggtggaatcgaaatctcgtgatggcaggttgggcgtcgcttggtcggtcatttcgaaccccagagtcccgctcagaagaactcgtcaagaaggcgatagaaggcgatgcgctgcgaatcgggagcggcgataccgtaaagcacgaggaagcggtcagcccattcgccgccaagctcttcagcaatatcacgggtagccaacgctatgtcctgatagcggtccgccacacccagccggccacagtcgatgaatccagaaaagcggccattttccaccatgatattcggcaagcaggcatcgccatgggtcacgacgagatcatcgccgtcgggcatgcgcgccttgagcctggcgaacagttcggctggcgcgagcccctgatgctcttcgtccagatcatcctgatcgacaagaccggcttccatccgagtacgtgctcgctcgatgcgatgtttcgcttggtggtcgaatgggcaggtagccggatcaagcgtatgcagccgccgcattgcatcagccatgatggatactttctcggcaggagcaaggtgagatgacaggagatcctgccccggcacttcgcccaatagcagccagtcccttcccgcttcagtgacaacgtcgagcacagctgcgcaaggaacgcccgtcgtggccagccacgatagccgcgctgcctcgtcctgcagttcattcagggcaccggacaggtcggtcttgacaaaaagaaccgggcgcccctgcgctgacagccggaacacggcggcatcagagcagccgattgtctgttgtgcccagtcatagccgaatagcctctccacccaagcggccggagaacctgcgtgcaatccatcttgttcaatcatgcgaaacgatccagatccggtgcagattatttggattgagagtgaatatgagactctaattggataccgaggggaatttatggaacgtcagtggagcatttttgacaagaaatatttgctagctgatagtgaccttaggcgacttttgaacgcgcaataatggtttctgacgtatgtgcttagctcattaaactccagaaacccgcggctgagtggctccttcaacgttgcggttctgtcagttccaaacgtaaaacggcttgtcccgcgtcatcggcgggggtcataacgtgactcccttaattctccgctcatgatgaattcagaaataaattcagcctaattcggcgttaattcagtacattaaaaacgtccgcaatgtgttattaagttgtctaagcgtcaatttgtttacaccacaatatatcctgccaccagccagccaacagctccccgaccggcagctcggcacaaaatcaccactcgatacaggcagcccatcagtccgggacggcgtcagcgggagagccgttgtaaggcggcagactttgctcatgttaccgatgctattcggaagaacggcaactaagctgccgggtttgaaacacggatgatctcgcggagggtagcatgttgattgtaacgatgacagagcgttgctgcctgtgatcaattcgggcacgaacccagtggacataagcctgttcggttcgtaagctgtaatgcaagtagcgtatgcgctcacgcaactggtccagaaccttgaccgaacgcagcggtggtaacggcgcagtggcggttttcatggcttgttatgactgtttttttggggtacagtctatgcctcgggcatccaagcagcaagcgcgttacgccgtgggtcgatgtttgatgttatggagcagcaacgatgttacgcagcagggcagtcgccctaaaacaaagttaaacatcatgggggaagcggtgatcgccgaagtatcgactcaactatcagaggtagttggcgtcatcgagcgccatctcgaaccgacgttgctggccgtacatttgtacggctccgcagtggatggcggcctgaagccacacagtgatattgatttgctggttacggtgaccgtaaggcttgatgaaacaacgcggcgagctttgatcaacgaccttttggaaacttcggcttcccctggagagagcgagattctccgcgctgtagaagtcaccattgttgtgcacgacgacatcattccgtggcgttatccagctaagcgcgaactgcaatttggagaatggcagcgcaatgacattcttgcaggtatcttcgagccagccacgatcgacattgatctggctatcttgctgacaaaagcaagagaacatagcgttgccttggtaggtccagcggcggaggaactctttgatccggttcctgaacaggatctatttgaggcgctaaatgaaaccttaacgctatggaactcgccgcccgactgggctggcgatgagcgaaatgtagtgcttacgttgtcccgcatttggtacagcgcagtaaccggcaaaatcgcgccgaaggatgtcgctgccgactgggcaatggagcgcctgccggcccagtatcagcccgtcatacttgaagctagacaggcttatcttggacaagaagaagatcgcttggcctcgcgcgcagatcagttggaagaatttgtccactacgtgaaaggcgagatcaccaaggtagtcggcaaataatgtctagctagaaattcgttcaagccgacgccgcttcgcggcgcggcttaactcaagcgttagatgcactaagcacataattgctcacagccaaactatcaggtcaagtctgcttttattatttttaagcgtgcataataagccctacacaaattgggagatatatcatgcatgaccaaaatcccttaacgtgagttttcgttccactgagcgtcagaccccgtagaaaagatcaaaggatcttcttgagatcctttttttctgcgcgtaatctgctgcttgcaaacaaaaaaaccaccgctaccagcggtggtttgtttgccggatcaagagctaccaactctttttccgaaggtaactggcttcagcagagcgcagataccaaatactgtccttctagtgtagccgtagttaggccaccacttcaagaactctgtagcaccgcctacatacctcgctctgctaatcctgttaccagtggctgctgccagtggcgataagtcgtgtcttaccgggttggactcaagacgatagttaccggataaggcgcagcggtcgggctgaacggggggttcgtgcacacagcccagcttggagcgaacgacctacaccgaactgagatacctacagcgtgagctatgagaaagcgccacgcttcccgaagggagaaaggcggacaggtatccggtaagcggcagggtcggaacaggagagcgcacgagggagcttccagggggaaacgcctggtatctttatagtcctgtcgggtttcgccacctctgacttgagcgtcgatttttgtgatgctcgtcaggggggcggagcctatggaaaaacgccagcaacgcggcctttttacggttcctggccttttgctggccttttgctcacatgttctttcctgcgttatcccctgattctgtggataaccgtattaccgcctttgagtgagctgataccgctcgccgcagccgaacgaccgagcgcagcgagtcagtgagcgaggaagcggaagagcgcctgatgcggtattttctccttacgcatctgtgcggtatttcacaccgcatatggtgcactctcagtacaatctgctctgatgccgcatagttaagccagtatacactccgctatcgctacgtgactgggtcatggctgcgccccgacacccgccaacacccgctgacgcgccctgacgggcttgtctgctcccggcatccgcttacagacaagctgtgaccgtctccgggagctgcatgtgtcagaggttttcaccgtcatcaccgaaacgcgcgaggcagggtgccttgatgtgggcgccggcggtcgagtggcgacggcgcggcttgtccgcgccctggtagattgcctggccgtaggccagccatttttgagcggccagcggccgcgataggccgacgcgaagcggcggggcgtagggagcgcagcgaccgaagggtaggcgctttttgcagctcttcggctgtgcgctggccagacagttatgcacaggccaggcgggttttaagagttttaataagttttaaagagttttaggcggaaaaatcgccttttttctcttttatatcagtcacttacatgtgtgaccggttcccaatgtacggctttgggttcccaatgtacgggttccggttcccaatgtacggctttgggttcccaatgtacgtgctatccacaggaaagagaccttttcgacctttttcccctgctagggcaatttgccctagcatctgctccgtacattaggaaccggcggatgcttcgccctcgatcaggttgcggtagcgcatgactaggatcgggccagcctgccccgcctcctccttcaaatcgtactccggcaggtcatttgacccgatcagcttgcgcacggtgaaacagaacttcttgaactctccggcgctgccactgcgttcgtagatcgtcttgaacaaccatctggcttctgccttgcctgcggcgcggcgtgccaggcggtagagaaaacggccgatgccgggatcgatcaaaaagtaatcggggtgaaccgtcagcacgtccgggttcttgccttctgtgatctcgcggtacatccaatcagctagctcgatctcgatgtactccggccgcccggtttcgctctttacgatcttgtagcggctaatcaaggcttcaccctcggataccgtcaccaggcggccgttcttggccttcttcgtacgctgcatggcaacgtgcgtggtgtttaaccgaatgcaggtttctaccaggtcgtctttctgctttccgccatcggctcgccggcagaacttgagtacgtccgcaacgtgtggacggaacacgcggccgggcttgtctcccttcccttcccggtatcggttcatggattcggttagatgggaaaccgccatcagtaccaggtcgtaatcccacacactggccatgccggccggccctgcggaaacctctacgtgcccgtctggaagctcgtagcggatcacctcgccagctcgtcggtcacgcttcgacagacggaaaacggccacgtccatgatgctgcgactatcgcgggtgcccacgtcatagagcatcggaacgaaaaaatctggttgctcgtcgcccttgggcggcttcctaatcgacggcgcaccggctgccggcggttgccgggattctttgcggattcgatcagcggccgcttgccacgattcaccggggcgtgcttctgcctcgatgcgttgccgctgggcggcctgcgcggccttcaacttctccaccaggtcatcacccagcgccgcgccgatttgtaccgggccggatggtttgcgaccgctcacgccgattcctcgggcttgggggttccagtgccattgcagggccggcagacaacccagccgcttacgcctggccaaccgcccgttcctccacacatggggcattccacggcgtcggtgcctggttgttcttgattttccatgccgcctcctttagccgctaaaattcatctactcatttattcatttgctcatttactctggtagctgcgcgatgtattcagatagcagctcggtaatggtcttgccttggcgtaccgcgtacatcttcagcttggtgtgatcctccgccggcaactgaaagttgacccgcttcatggctggcgtgtctgccaggctggccaacgttgcagccttgctgctgcgtgcgctcggacggccggcacttagcgtgtttgtgcttttgctcattttctctttacctcattaactcaaatgagttttgatttaatttcagcggccagcgcctggacctcgcgggcagcgtcgccctcgggttctgattcaagaacggttgtgccggcggcggcagtgcctgggtagctcacgcgctgcgtgatacgggactcaagaatgggcagctcgtacccggccagcgcctcggcaacctcaccgccgatgcgcgtgcctttgatcgcccgcgacacgacaaaggccgcttgtagccttccatccgtgacctcaatgcgctgcttaaccagctccaccaggtcggcggtggcccatatgtcgtaagggcttggctgcaccggaatcagcacgaagtcggctgccttgatcgcggacacagccaagtccgccgcctggggcgctccgtcgatcactacgaagtcgcgccggccgatggccttcacgtcgcggtcaatcgtcgggcggtcgatgccgacaacggttagcggttgatcttcccgcacggccgcccaatcgcgggcactgccctggggatcggaatcgactaacagaacatcggccccggcgagttgcagggcgcgggctagatgggttgcgatggtcgtcttgcctgacccgcctttctggttaagtacagcgataaccttcatgcgttccccttgcgtatttgtttatttactcatcgcatcatatacgcagcgaccgcatgacgcaagctgttttactcaaatacacatcacctttttagacggcggcgctcggtttcttcagcggccaagctggccggccaggccgccagcttggcatcagacaaaccggccaggatttcatgcagccgcacggttgagacgtgcgcgggcggctcgaacacgtacccggccgcgatcatctccgcctcgatctcttcggtaatgaaaaacggttcgtcctggccgtcctggtgcggtttcatgcttgttcctcttggcgttcattctcggcggccgccagggcgtcggcctcggtcaatgcgtcctcacggaaggcaccgcgccgcctggcctcggtgggcgtcacttcctcgctgcgctcaagtgcgcggtacagggtcgagcgatgcacgccaagcagtgcagccgcctctttcacggtgcggccttcctggtcgatcagctcgcgggcgtgcgcgatctgtgccggggtgagggtagggcgggggccaaacttcacgcctcgggccttggcggcctcgcgcccgctccgggtgcggtcgatgattagggaacgctcgaactcggcaatgccggcgaacacggtcaacaccatgcggccggccggcgtggtggtgtcggcccacggctctgccaggctacgcaggcccgcgccggcctcctggatgcgctcggcaatgtccagtaggtcgcgggtgctgcgggccaggcggtctagcctggtcactgtcacaacgtcgccagggcgtaggtggtcaagcatcctggccagctccgggcggtcgcgcctggtgccggtgatcttctcggaaaacagcttggtgcagccggccgcgtgcagttcggcccgttggttggtcaagtcctggtcgtcggtgctgacgcgggcatagcccagcaggccagcggcggcgctcttgttcatggcgtaatgtctccggttctagtcgcaagtattctactttatgcgactaaaacacgcgacaagaaaacgccaggaaaagggcagggcggcagcctgtcgcgtaacttaggacttgtgcgacatgtcgttttcagaagacggctgcactgaacgtcagaagccgactgcactatagcagcggaggggttggatcaaagtactttgatcccgaggggaaccctgtggttggcatgcacatacaaatggacgaacggataaaccttttcacgcccttttaaatatccgattattctaataaacgctcttttctcttag

SEQ ID NO: 19 - DNA, 11376 bp, Artificial Sequence
  Synthetic DNA vector
gtttacccgccaatatatcctgtcaaacactgatagtttaaactgaaggcgggaaacgacaatctgatccaagctcaagctgctctagcattcgccattcaggctgcgcaactgttgggaagggcgatcggtgcgggcctcttcgctattacgccagctggcgaaagggggatgtgctgcaaggcgattaagttgggtaacgccagggttttcccagtcacgacgttgtaaaacgacggccagtgccaagcttattaccctgttatccctaaccggttgcttgcaaaagcagtaattggaaagcactctcaaagaatcccctgcaggcacgtaataagtgtgcgttgaatttattcgcaaaaacattgcatattttcggcaaagtaaaattttgttgcataccttatcaaaaaataagtgctgcatactttttagagaaaccaaataattttttattgcatacccgtttttaataaaatacattgcataccctcttttaataaaaaatattgcatactttgacgaaacaaattttcgttgcatacccaataaaagattattatattgcatacccgtttttaataaaatacattgcataccctcttttaataaaaaatattgcatacgttgacgaaacaaattttcgttgcatacccaataaaagattattatattgcataccttttcttgccataccatttagccgatcaattgtgctcggcatctagagttatcaacaagtttgtacaaaaaagctgaacgagaaacgtaaaatgatataaatatcaatatattaaattagattttgcataaaaaacagactacataatactgtaaaacacaacatatccagtcactatggcggcccctcgaggggccgcattaggcaccccaggctttacactttatgcttccggctcgtataatgtgtggattttgagttaggatccggcgagattttcaggagctaaggaagctaaaatggagaaaaaaatcactggatataccaccgttgatatatcccaatggcatcgtaaagaacattttgaggcatttcagtcagttgctcaatgtacctataaccagaccgttcagctggatattacggcctttttaaagaccgtaaagaaaaataagcacaagttttatccggcctttattcacattcttgcccgcctgatgaatgctcatccggaattccgtatggcaatgaaagacggtgagctggtgatatgggatagtgttcacccttgttacaccgttttccatgagcaaactgaaacgttttcatcgctctggagtgaataccacgacgatttccggcagtttctacacatatattcgcaagatgtggcgtgttacggtgaaaacctggcctatttccctaaagggtttattgagaatatgtttttcgtctcagccaatccctgggtgagtttcaccagttttgatttaaacgtggccaatatggacaacttcttcgcccccgttttcaccatgggcaaatattatacgcaaggcgacaaggtgctgatgccgctggcgattcaggttcatcatgccgtctgtgatggcttccatgtcggcagaatgcttaatgaattacaacagtactgcgatgagtggcagggcggggcgtaaagatctggatccggcttactaaaagccagataacagtatgcgtatttgcgcgctgatttttgcggtataagaatatatactgatatgtatacccgaagtatgtcaaaaagaggtgtgctatgaagcagcgtattacagtgacagttgacagcgacagctatcagttgctcaaggcatatatgatgtcaatatctccggtctggtaagcacaaccatgcagaatgaagcccgtcgtctgcgtgccgaacgctggaaagcggaaaatcaggaagggatggctgaggtcgcccggtttattgaaatgaacggctcttttgctgacgagaacagggactggtgaaatgcagtttaaggtttacacctataaaagagagagccgttatcgtctgtttgtggatgtacagagtgatattattgacacgcccgggcgacggatggtgatccccctggccagtgcacgtctgctgtcagataaagtctcccgtgaactttacccggtggtgcatatcggggatgaaagctggcgcatgatgaccaccgatatggccagtgtgccggtctccgttatcggggaagaagtggctgatctcagccaccgcgaaaatgacatcaaaaacgccattaacctgatgttctggggaatataaatgtcaggctcccttatacacagccagtctgcaggtcgaccatagtgactggatatgttgtgttttacagtattatgtagtctgttttttatgcaaaatctaatttaatatattgatatttatatcattttacgtttctcgttcagctttcttgtacaaagtggttgataacagcgcttagagctctgccgagcacaattgatcggctaaatggtatggcaagaaaaggtatgcaatataataatcttttattgggtatgcaacgaaaatttgtttcgtcaacgtatgcaatattttttattaaaagagggtatgcaatgtattttattaaaaacgggtatgcaatataataatcttttattgggtatgcaacgaaaatttgtttcgtcaaagtatgcaatattttttattaaaagagggtatgcaatgtattttattaaaaacgggtatgcaataaaaaattatttggtttctctaaaaagtatgcagcacttattttttgataaggtatgcaacaaaattttactttgccgaaaatatgcaatgtttttgcgaataaattcaacgcacacttattacgtgggcgcgccttaattaaattaatggtaccggtagataagttgatttagccataaaatattgtttccgtgaccccttaattaatagggataacagggtaatactagtggcgcgcctatttctgaattcccgatctagtaacatagatgacaccgcgcgcgataatttatcctagtttgcgcgctatattttgttttctatcgcgtattaaatgtataattgcgggactctaatcataaaaacccatctcataaataacgtcatgcattacatgttaattattacatgcttaacgtaattcaacagaaattatatgataatcatcgcaagaccggcaacaggattcaatcttaagaaactttattgccaaatgtttgaacgatcggggatcatccgggtctgtggcgggaactccacgaaaatatccgaacgcagcaagatatcgcggtgcatctcggtcttgcctgggcagtcgccgccgacgccgttgatgtggacgccgggcccgatcatattgtcgctcaggatcgtggcgttgtgcttgtcggccgttgctgtcgtaatgatatcggcaccttcgaccgcctgttccgcagagatcccgtgggcgaagaactccagcatgagatccccgcgctggaggatcatccagccggcgtcccggaaaacgattccgaagcccaacctttcatagaaggcggcggtggaatcgaaatctcgtgatggcaggttgggcgtcgcttggtcggtcatttcgaaccccagagtcccgctcagaagaactcgtcaagaaggcgatagaaggcgatgcgctgcgaatcgggagcggcgataccgtaaagcacgaggaagcggtcagcccattcgccgccaagctcttcagcaatatcacgggtagccaacgctatgtcctgatagcggtccgccacacccagccggccacagtcgatgaatccagaaaagcggccattttccaccatgatattcggcaagcaggcatcgccatgggtcacgacgagatcatcgccgtcgggcatgcgcgccttgagcctggcgaacagttcggctggcgcgagcccctgatgctcttcgtccagatcatcctgatcgacaagaccggcttccatccgagtacgtgctcgctcgatgcgatgtttcgcttggtggtcgaatgggcaggtagccggatcaagcgtatgcagccgccgcattgcatcagccatgatggatactttctcggcaggagcaaggtgagatgacaggagatcctgccccggcacttcgcccaatagcagccagtcccttcccgcttcagtgacaacgtcgagcacagctgcgcaaggaacgcccgtcgtggccagccacgatagccgcgctgcctcgtcctgcagttcattcagggcaccggacaggtcggtcttgacaaaaagaaccgggcgcccctgcgctgacagccggaacacggcggcatcagagcagccgattgtctgttgtgcccagtcatagccgaatagcctctccacccaagcggccggagaacctgcgtgcaatccatcttgttcaatcatgcgaaacgatccagatccggtgcagattatttggattgagagtgaatatgagactctaattggataccgaggggaatttatggaacgtcagtggagcatttttgacaagaaatatttgctagctgatagtgaccttaggcgacttttgaacgcgcaataatggtttctgacgtatgtgcttagctcattaaactccagaaacccgcggctgagtggctccttcaacgttgcggttctgtcagttccaaacgtaaaacggcttgtcccgcgtcatcggcgggggtcataacgtgactcccttaattctccgctcatgatgaattcagaaataaattcagcctaattcggcgttaattcagtacattaaaaacgtccgcaatgtgttattaagttgtctaagcgtcaatttgtttacaccacaatatatcctgccaccagccagccaacagctccccgaccggcagctcggcacaaaatcaccactcgatacaggcagcccatcagtccgggacggcgtcagcgggagagccgttgtaaggcggcagactttgctcatgttaccgatgctattcggaagaacggcaactaagctgccgggtttgaaacacggatgatctcgcggagggtagcatgttgattgtaacgatgacagagcgttgctgcctgtgatcaattcgggcacgaacccagtggacataagcctgttcggttcgtaagctgtaatgcaagtagcgtatgcgctcacgcaactggtccagaaccttgaccgaacgcagcggtggtaacggcgcagtggcggttttcatggcttgttatgactgtttttttggggtacagtctatgcctcgggcatccaagcagcaagcgcgttacgccgtgggtcgatgtttgatgttatggagcagcaacgatgttacgcagcagggcagtcgccctaaaacaaagttaaacatcatgggggaagcggtgatcgccgaagtatcgactcaactatcagaggtagttggcgtcatcgagcgccatctcgaaccgacgttgctggccgtacatttgtacggctccgcagtggatggcggcctgaagccacacagtgatattgatttgctggttacggtgaccgtaaggcttgatgaaacaacgcggcgagctttgatcaacgaccttttggaaacttcggcttcccctggagagagcgagattctccgcgctgtagaagtcaccattgttgtgcacgacgacatcattccgtggcgttatccagctaagcgcgaactgcaatttggagaatggcagcgcaatgacattcttgcaggtatcttcgagccagccacgatcgacattgatctggctatcttgctgacaaaagcaagagaacatagcgttgccttggtaggtccagcggcggaggaactctttgatccggttcctgaacaggatctatttgaggcgctaaatgaaaccttaacgctatggaactcgccgcccgactgggctggcgatgagcgaaatgtagtgcttacgttgtcccgcatttggtacagcgcagtaaccggcaaaatcgcgccgaaggatgtcgctgccgactgggcaatggagcgcctgccggcccagtatcagcccgtcatacttgaagctagacaggcttatcttggacaagaagaagatcgcttggcctcgcgcgcagatcagttggaagaatttgtccactacgtgaaaggcgagatcaccaaggtagtcggcaaataatgtctagctagaaattcgttcaagccgacgccgcttcgcggcgcggcttaactcaagcgttagatgcactaagcacataattgctcacagccaaactatcaggtcaagtctgcttttattatttttaagcgtgcataataagccctacacaaattgggagatatatcatgcatgaccaaaatcccttaacgtgagttttcgttccactgagcgtcagaccccgtagaaaagatcaaaggatcttcttgagatcctttttttctgcgcgtaatctgctgcttgcaaacaaaaaaaccaccgctaccagcggtggtttgtttgccggatcaagagctaccaactctttttccgaaggtaactggcttcagcagagcgcagataccaaatactgtccttctagtgtagccgtagttaggccaccacttcaagaactctgtagcaccgcctacatacctcgctctgctaatcctgttaccagtggctgctgccagtggcgataagtcgtgtcttaccgggttggactcaagacgatagttaccggataaggcgcagcggtcgggctgaacggggggttcgtgcacacagcccagcttggagcgaacgacctacaccgaactgagatacctacagcgtgagctatgagaaagcgccacgcttcccgaagggagaaaggcggacaggtatccggtaagcggcagggtcggaacaggagagcgcacgagggagcttccagggggaaacgcctggtatctttatagtcctgtcgggtttcgccacctctgacttgagcgtcgatttttgtgatgctcgtcaggggggcggagcctatggaaaaacgccagcaacgcggcctttttacggttcctggccttttgctggccttttgctcacatgttctttcctgcgttatcccctgattctgtggataaccgtattaccgcctttgagtgagctgataccgctcgccgcagccgaacgaccgagcgcagcgagtcagtgagcgaggaagcggaagagcgcctgatgcggtattttctccttacgcatctgtgcggtatttcacaccgcatatggtgcactctcagtacaatctgctctgatgccgcatagttaagccagtatacactccgctatcgctacgtgactgggtcatggctgcgccccgacacccgccaacacccgctgacgcgccctgacgggcttgtctgctcccggcatccgcttacagacaagctgtgaccgtctccgggagctgcatgtgtcagaggttttcaccgtcatcaccgaaacgcgcgaggcagggtgccttgatgtgggcgccggcggtcgagtggcgacggcgcggcttgtccgcgccctggtagattgcctggccgtaggccagccatttttgagcggccagcggccgcgataggccgacgcgaagcggcggggcgtagggagcgcagcgaccgaagggtaggcgctttttgcagctcttcggctgtgcgctggccagacagttatgcacaggccaggcgggttttaagagttttaataagttttaaagagttttaggcggaaaaatcgccttttttctcttttatatcagtcacttacatgtgtgaccggttcccaatgtacggctttgggttcccaatgtacgggttccggttcccaatgtacggctttgggttcccaatgtacgtgctatccacaggaaagagaccttttcgacctttttcccctgctagggcaatttgccctagcatctgctccgtacattaggaaccggcggatgcttcgccctcgatcaggttgcggtagcgcatgactaggatcgggccagcctgccccgcctcctccttcaaatcgtactccggcaggtcatttgacccgatcagcttgcgcacggtgaaacagaacttcttgaactctccggcgctgccactgcgttcgtagatcgtcttgaacaaccatctggcttctgccttgcctgcggcgcggcgtgccaggcggtagagaaaacggccgatgccgggatcgatcaaaaagtaatcggggtgaaccgtcagcacgtccgggttcttgccttctgtgatctcgcggtacatccaatcagctagctcgatctcgatgtactccggccgcccggtttcgctctttacgatcttgtagcggctaatcaaggcttcaccctcggataccgtcaccaggcggccgttcttggccttcttcgtacgctgcatggcaacgtgcgtggtgtttaaccgaatgcaggtttctaccaggtcgtctttctgctttccgccatcggctcgccggcagaacttgagtacgtccgcaacgtgtggacggaacacgcggccgggcttgtctcccttcccttcccggtatcggttcatggattcggttagatgggaaaccgccatcagtaccaggtcgtaatcccacacactggccatgccggccggccctgcggaaacctctacgtgcccgtctggaagctcgtagcggatcacctcgccagctcgtcggtcacgcttcgacagacggaaaacggccacgtccatgatgctgcgactatcgcgggtgcccacgtcatagagcatcggaacgaaaaaatctggttgctcgtcgcccttgggcggcttcctaatcgacggcgcaccggctgccggcggttgccgggattctttgcggattcgatcagcggccgcttgccacgattcaccggggcgtgcttctgcctcgatgcgttgccgctgggcggcctgcgcggccttcaacttctccaccaggtcatcacccagcgccgcgccgatttgtaccgggccggatggtttgcgaccgctcacgccgattcctcgggcttgggggttccagtgccattgcagggccggcagacaacccagccgcttacgcctggccaaccgcccgttcctccacacatggggcattccacggcgtcggtgcctggttgttcttgattttccatgccgcctcctttagccgctaaaattcatctactcatttattcatttgctcatttactctggtagctgcgcgatgtattcagatagcagctcggtaatggtcttgccttggcgtaccgcgtacatcttcagcttggtgtgatcctccgccggcaactgaaagttgacccgcttcatggctggcgtgtctgccaggctggccaacgttgcagccttgctgctgcgtgcgctcggacggccggcacttagcgtgtttgtgcttttgctcattttctctttacctcattaactcaaatgagttttgatttaatttcagcggccagcgcctggacctcgcgggcagcgtcgccctcgggttctgattcaagaacggttgtgccggcggcggcagtgcctgggtagctcacgcgctgcgtgatacgggactcaagaatgggcagctcgtacccggccagcgcctcggcaacctcaccgccgatgcgcgtgcctttgatcgcccgcgacacgacaaaggccgcttgtagccttccatccgtgacctcaatgcgctgcttaaccagctccaccaggtcggcggtggcccatatgtcgtaagggcttggctgcaccggaatcagcacgaagtcggctgccttgatcgcggacacagccaagtccgccgcctggggcgctccgtcgatcactacgaagtcgcgccggccgatggccttcacgtcgcggtcaatcgtcgggcggtcgatgccgacaacggttagcggttgatcttcccgcacggccgcccaatcgcgggcactgccctggggatcggaatcgactaacagaacatcggccccggcgagttgcagggcgcgggctagatgggttgcgatggtcgtcttgcctgacccgcctttctggttaagtacagcgataaccttcatgcgttccccttgcgtatttgtttatttactcatcgcatcatatacgcagcgaccgcatgacgcaagctgttttactcaaatacacatcacctttttagacggcggcgctcggtttcttcagcggccaagctggccggccaggccgccagcttggcatcagacaaaccggccaggatttcatgcagccgcacggttgagacgtgcgcgggcggctcgaacacgtacccggccgcgatcatctccgcctcgatctcttcggtaatgaaaaacggttcgtcctggccgtcctggtgcggtttcatgcttgttcctcttggcgttcattctcggcggccgccagggcgtcggcctcggtcaatgcgtcctcacggaaggcaccgcgccgcctggcctcggtgggcgtcacttcctcgctgcgctcaagtgcgcggtacagggtcgagcgatgcacgccaagcagtgcagccgcctctttcacggtgcggccttcctggtcgatcagctcgcgggcgtgcgcgatctgtgccggggtgagggtagggcgggggccaaacttcacgcctcgggccttggcggcctcgcgcccgctccgggtgcggtcgatgattagggaacgctcgaactcggcaatgccggcgaacacggtcaacaccatgcggccggccggcgtggtggtgtcggcccacggctctgccaggctacgcaggcccgcgccggcctcctggatgcgctcggcaatgtccagtaggtcgcgggtgctgcgggccaggcggtctagcctggtcactgtcacaacgtcgccagggcgtaggtggtcaagcatcctggccagctccgggcggtcgcgcctggtgccggtgatcttctcggaaaacagcttggtgcagccggccgcgtgcagttcggcccgttggttggtcaagtcctggtcgtcggtgctgacgcgggcatagcccagcaggccagcggcggcgctcttgttcatggcgtaatgtctccggttctagtcgcaagtattctactttatgcgactaaaacacgcgacaagaaaacgccaggaaaagggcagggcggcagcctgtcgcgtaacttaggacttgtgcgacatgtcgttttcagaagacggctgcactgaacgtcagaagccgactgcactatagcagcggaggggttggatcaaagtactttgatcccgaggggaaccctgtggttggcatgcacatacaaatggacgaacggataaaccttttcacgcccttttaaatatccgattattctaataaacgctcttttctcttag

SEQ ID NO: 20 - DNA, 11376 bp, Artificial Sequence
  Synthetic DNA vector
gtttacccgccaatatatcctgtcaaacactgatagtttaaactgaaggcgggaaacgacaatctgatccaagctcaagctgctctagcattcgccattcaggctgcgcaactgttgggaagggcgatcggtgcgggcctcttcgctattacgccagctggcgaaagggggatgtgctgcaaggcgattaagttgggtaacgccagggttttcccagtcacgacgttgtaaaacgacggccagtgccaagcttattaccctgttatccctaaccggtagataagttgatttagccataaaatattgtttccgtgacccccctgcaggcacgtaataagtgtgcgttgaatttattcgcaaaaacattgcatattttcggcaaagtaaaattttgttgcataccttatcaaaaaataagtgctgcatactttttagagaaaccaaataattttttattgcatacccgtttttaataaaatacattgcataccctcttttaataaaaaatattgcatactttgacgaaacaaattttcgttgcatacccaataaaagattattatattgcatacccgtttttaataaaatacattgcataccctcttttaataaaaaatattgcatacgttgacgaaacaaattttcgttgcatacccaataaaagattattatattgcataccttttcttgccataccatttagccgatcaattgtgctcggcatctagagttatcaacaagtttgtacaaaaaagctgaacgagaaacgtaaaatgatataaatatcaatatattaaattagattttgcataaaaaacagactacataatactgtaaaacacaacatatccagtcactatggcggcccctcgaggggccgcattaggcaccccaggctttacactttatgcttccggctcgtataatgtgtggattttgagttaggatccggcgagattttcaggagctaaggaagctaaaatggagaaaaaaatcactggatataccaccgttgatatatcccaatggcatcgtaaagaacattttgaggcatttcagtcagttgctcaatgtacctataaccagaccgttcagctggatattacggcctttttaaagaccgtaaagaaaaataagcacaagttttatccggcctttattcacattcttgcccgcctgatgaatgctcatccggaattccgtatggcaatgaaagacggtgagctggtgatatgggatagtgttcacccttgttacaccgttttccatgagcaaactgaaacgttttcatcgctctggagtgaataccacgacgatttccggcagtttctacacatatattcgcaagatgtggcgtgttacggtgaaaacctggcctatttccctaaagggtttattgagaatatgtttttcgtctcagccaatccctgggtgagtttcaccagttttgatttaaacgtggccaatatggacaacttcttcgcccccgttttcaccatgggcaaatattatacgcaaggcgacaaggtgctgatgccgctggcgattcaggttcatcatgccgtctgtgatggcttccatgtcggcagaatgcttaatgaattacaacagtactgcgatgagtggcagggcggggcgtaaagatctggatccggcttactaaaagccagataacagtatgcgtatttgcgcgctgatttttgcggtataagaatatatactgatatgtatacccgaagtatgtcaaaaagaggtgtgctatgaagcagcgtattacagtgacagttgacagcgacagctatcagttgctcaaggcatatatgatgtcaatatctccggtctggtaagcacaaccatgcagaatgaagcccgtcgtctgcgtgccgaacgctggaaagcggaaaatcaggaagggatggctgaggtcgcccggtttattgaaatgaacggctcttttgctgacgagaacagggactggtgaaatgcagtttaaggtttacacctataaaagagagagccgttatcgtctgtttgtggatgtacagagtgatattattgacacgcccgggcgacggatggtgatccccctggccagtgcacgtctgctgtcagataaagtctcccgtgaactttacccggtggtgcatatcggggatgaaagctggcgcatgatgaccaccgatatggccagtgtgccggtctccgttatcggggaagaagtggctgatctcagccaccgcgaaaatgacatcaaaaacgccattaacctgatgttctggggaatataaatgtcaggctcccttatacacagccagtctgcaggtcgaccatagtgactggatatgttgtgttttacagtattatgtagtctgttttttatgcaaaatctaatttaatatattgatatttatatcattttacgtttctcgttcagctttcttgtacaaagtggttgataacagcgcttagagctctgccgagcacaattgatcggctaaatggtatggcaagaaaaggtatgcaatataataatcttttattgggtatgcaacgaaaatttgtttcgtcaacgtatgcaatattttttattaaaagagggtatgcaatgtattttattaaaaacgggtatgcaatataataatcttttattgggtatgcaacgaaaatttgtttcgtcaaagtatgcaatattttttattaaaagagggtatgcaatgtattttattaaaaacgggtatgcaataaaaaattatttggtttctctaaaaagtatgcagcacttattttttgataaggtatgcaacaaaattttactttgccgaaaatatgcaatgtttttgcgaataaattcaacgcacacttattacgtgggcgcgccttaattaaattaatggtaccggttctgagtcacggcttcattggcattccgtacaacgaacgtccttaattaatagggataacagggtaatactagtggcgcgcctatttctgaattcccgatctagtaacatagatgacaccgcgcgcgataatttatcctagtttgcgcgctatattttgttttctatcgcgtattaaatgtataattgcgggactctaatcataaaaacccatctcataaataacgtcatgcattacatgttaattattacatgcttaacgtaattcaacagaaattatatgataatcatcgcaagaccggcaacaggattcaatcttaagaaactttattgccaaatgtttgaacgatcggggatcatccgggtctgtggcgggaactccacgaaaatatccgaacgcagcaagatatcgcggtgcatctcggtcttgcctgggcagtcgccgccgacgccgttgatgtggacgccgggcccgatcatattgtcgctcaggatcgtggcgttgtgcttgtcggccgttgctgtcgtaatgatatcggcaccttcgaccgcctgttccgcagagatcccgtgggcgaagaactccagcatgagatccccgcgctggaggatcatccagccggcgtcccggaaaacgattccgaagcccaacctttcatagaaggcggcggtggaatcgaaatctcgtgatggcaggttgggcgtcgcttggtcggtcatttcgaaccccagagtcccgctcagaagaactcgtcaagaaggcgatagaaggcgatgcgctgcgaatcgggagcggcgataccgtaaagcacgaggaagcggtcagcccattcgccgccaagctcttcagcaatatcacgggtagccaacgctatgtcctgatagcggtccgccacacccagccggccacagtcgatgaatccagaaaagcggccattttccaccatgatattcggcaagcaggcatcgccatgggtcacgacgagatcatcgccgtcgggcatgcgcgccttgagcctggcgaacagttcggctggcgcgagcccctgatgctcttcgtccagatcatcctgatcgacaagaccggcttccatccgagtacgtgctcgctcgatgcgatgtttcgcttggtggtcgaatgggcaggtagccggatcaagcgtatgcagccgccgcattgcatcagccatgatggatactttctcggcaggagcaaggtgagatgacaggagatcctgccccggcacttcgcccaatagcagccagtcccttcccgcttcagtgacaacgtcgagcacagctgcgcaaggaacgcccgtcgtggccagccacgatagccgcgctgcctcgtcctgcagttcattcagggcaccggacaggtcggtcttgacaaaaagaaccgggcgcccctgcgctgacagccggaacacggcggcatcagagcagccgattgtctgttgtgcccagtcatagccgaatagcctctccacccaagcggccggagaacctgcgtgcaatccatcttgttcaatcatgcgaaacgatccagatccggtgcagattatttggattgagagtgaatatgagactctaattggataccgaggggaatttatggaacgtcagtggagcatttttgacaagaaatatttgctagctgatagtgaccttaggcgacttttgaacgcgcaataatggtttctgacgtatgtgcttagctcattaaactccagaaacccgcggctgagtggctccttcaacgttgcggttctgtcagttccaaacgtaaaacggcttgtcccgcgtcatcggcgggggtcataacgtgactcccttaattctccgctcatgatgaattcagaaataaattcagcctaattcggcgttaattcagtacattaaaaacgtccgcaatgtgttattaagttgtctaagcgtcaatttgtttacaccacaatatatcctgccaccagccagccaacagctccccgaccggcagctcggcacaaaatcaccactcgatacaggcagcccatcagtccgggacggcgtcagcgggagagccgttgtaaggcggcagactttgctcatgttaccgatgctattcggaagaacggcaactaagctgccgggtttgaaacacggatgatctcgcggagggtagcatgttgattgtaacgatgacagagcgttgctgcctgtgatcaattcgggcacgaacccagtggacataagcctgttcggttcgtaagctgtaatgcaagtagcgtatgcgctcacgcaactggtccagaaccttgaccgaacgcagcggtggtaacggcgcagtggcggttttcatggcttgttatgactgtttttttggggtacagtctatgcctcgggcatccaagcagcaagcgcgttacgccgtgggtcgatgtttgatgttatggagcagcaacgatgttacgcagcagggcagtcgccctaaaacaaagttaaacatcatgggggaagcggtgatcgccgaagtatcgactcaactatcagaggtagttggcgtcatcgagcgccatctcgaaccgacgttgctggccgtacatttgtacggctccgcagtggatggcggcctgaagccacacagtgatattgatttgctggttacggtgaccgtaaggcttgatgaaacaacgcggcgagctttgatcaacgaccttttggaaacttcggcttcccctggagagagcgagattctccgcgctgtagaagtcaccattgttgtgcacgacgacatcattccgtggcgttatccagctaagcgcgaactgcaatttggagaatggcagcgcaatgacattcttgcaggtatcttcgagccagccacgatcgacattgatctggctatcttgctgacaaaagcaagagaacatagcgttgccttggtaggtccagcggcggaggaactctttgatccggttcctgaacaggatctatttgaggcgctaaatgaaaccttaacgctatggaactcgccgcccgactgggctggcgatgagcgaaatgtagtgcttacgttgtcccgcatttggtacagcgcagtaaccggcaaaatcgcgccgaaggatgtcgctgccgactgggcaatggagcgcctgccggcccagtatcagcccgtcatacttgaagctagacaggcttatcttggacaagaagaagatcgcttggcctcgcgcgcagatcagttggaagaatttgtccactacgtgaaaggcgagatcaccaaggtagtcggcaaataatgtctagctagaaattcgttcaagccgacgccgcttcgcggcgcggcttaactcaagcgttagatgcactaagcacataattgctcacagccaaactatcaggtcaagtctgcttttattatttttaagcgtgcataataagccctacacaaattgggagatatatcatgcatgaccaaaatcccttaacgtgagttttcgttccactgagcgtcagaccccgtagaaaagatcaaaggatcttcttgagatcctttttttctgcgcgtaatctgctgcttgcaaacaaaaaaaccaccgctaccagcggtggtttgtttgccggatcaagagctaccaactctttttccgaaggtaactggcttcagcagagcgcagataccaaatactgtccttctagtgtagccgtagttaggccaccacttcaagaactctgtagcaccgcctacatacctcgctctgctaatcctgttaccagtggctgctgccagtggcgataagtcgtgtcttaccgggttggactcaagacgatagttaccggataaggcgcagcggtcgggctgaacggggggttcgtgcacacagcccagcttggagcgaacgacctacaccgaactgagatacctacagcgtgagctatgagaaagcgccacgcttcccgaagggagaaaggcggacaggtatccggtaagcggcagggtcggaacaggagagcgcacgagggagcttccagggggaaacgcctggtatctttatagtcctgtcgggtttcgccacctctgacttgagcgtcgatttttgtgatgctcgtcaggggggcggagcctatggaaaaacgccagcaacgcggcctttttacggttcctggccttttgctggccttttgctcacatgttctttcctgcgttatcccctgattctgtggataaccgtattaccgcctttgagtgagctgataccgctcgccgcagccgaacgaccgagcgcagcgagtcagtgagcgaggaagcggaagagcgcctgatgcggtattttctccttacgcatctgtgcggtatttcacaccgcatatggtgcactctcagtacaatctgctctgatgccgcatagttaagccagtatacactccgctatcgctacgtgactgggtcatggctgcgccccgacacccgccaacacccgctgacgcgccctgacgggcttgtctgctcccggcatccgcttacagacaagctgtgaccgtctccgggagctgcatgtgtcagaggttttcaccgtcatcaccgaaacgcgcgaggcagggtgccttgatgtgggcgccggcggtcgagtggcgacggcgcggcttgtccgcgccctggtagattgcctggccgtaggccagccatttttgagcggccagcggccgcgataggccgacgcgaagcggcggggcgtagggagcgcagcgaccgaagggtaggcgctttttgcagctcttcggctgtgcgctggccagacagttatgcacaggccaggcgggttttaagagttttaataagttttaaagagttttaggcggaaaaatcgccttttttctcttttatatcagtcacttacatgtgtgaccggttcccaatgtacggctttgggttcccaatgtacgggttccggttcccaatgtacggctttgggttcccaatgtacgtgctatccacaggaaagagaccttttcgacctttttcccctgctagggcaatttgccctagcatctgctccgtacattaggaaccggcggatgcttcgccctcgatcaggttgcggtagcgcatgactaggatcgggccagcctgccccgcctcctccttcaaatcgtactccggcaggtcatttgacccgatcagcttgcgcacggtgaaacagaacttcttgaactctccggcgctgccactgcgttcgtagatcgtcttgaacaaccatctggcttctgccttgcctgcggcgcggcgtgccaggcggtagagaaaacggccgatgccgggatcgatcaaaaagtaatcggggtgaaccgtcagcacgtccgggttcttgccttctgtgatctcgcggtacatccaatcagctagctcgatctcgatgtactccggccgcccggtttcgctctttacgatcttgtagcggctaatcaaggcttcaccctcggataccgtcaccaggcggccgttcttggccttcttcgtacgctgcatggcaacgtgcgtggtgtttaaccgaatgcaggtttctaccaggtcgtctttctgctttccgccatcggctcgccggcagaacttgagtacgtccgcaacgtgtggacggaacacgcggccgggcttgtctcccttcccttcccggtatcggttcatggattcggttagatgggaaaccgccatcagtaccaggtcgtaatcccacacactggccatgccggccggccctgcggaaacctctacgtgcccgtctggaagctcgtagcggatcacctcgccagctcgtcggtcacgcttcgacagacggaaaacggccacgtccatgatgctgcgactatcgcgggtgcccacgtcatagagcatcggaacgaaaaaatctggttgctcgtcgcccttgggcggcttcctaatcgacggcgcaccggctgccggcggttgccgggattctttgcggattcgatcagcggccgcttgccacgattcaccggggcgtgcttctgcctcgatgcgttgccgctgggcggcctgcgcggccttcaacttctccaccaggtcatcacccagcgccgcgccgatttgtaccgggccggatggtttgcgaccgctcacgccgattcctcgggcttgggggttccagtgccattgcagggccggcagacaacccagccgcttacgcctggccaaccgcccgttcctccacacatggggcattccacggcgtcggtgcctggttgttcttgattttccatgccgcctcctttagccgctaaaattcatctactcatttattcatttgctcatttactctggtagctgcgcgatgtattcagatagcagctcggtaatggtcttgccttggcgtaccgcgtacatcttcagcttggtgtgatcctccgccggcaactgaaagttgacccgcttcatggctggcgtgtctgccaggctggccaacgttgcagccttgctgctgcgtgcgctcggacggccggcacttagcgtgtttgtgcttttgctcattttctctttacctcattaactcaaatgagttttgatttaatttcagcggccagcgcctggacctcgcgggcagcgtcgccctcgggttctgattcaagaacggttgtgccggcggcggcagtgcctgggtagctcacgcgctgcgtgatacgggactcaagaatgggcagctcgtacccggccagcgcctcggcaacctcaccgccgatgcgcgtgcctttgatcgcccgcgacacgacaaaggccgcttgtagccttccatccgtgacctcaatgcgctgcttaaccagctccaccaggtcggcggtggcccatatgtcgtaagggcttggctgcaccggaatcagcacgaagtcggctgccttgatcgcggacacagccaagtccgccgcctggggcgctccgtcgatcactacgaagtcgcgccggccgatggccttcacgtcgcggtcaatcgtcgggcggtcgatgccgacaacggttagcggttgatcttcccgcacggccgcccaatcgcgggcactgccctggggatcggaatcgactaacagaacatcggccccggcgagttgcagggcgcgggctagatgggttgcgatggtcgtcttgcctgacccgcctttctggttaagtacagcgataaccttcatgcgttccccttgcgtatttgtttatttactcatcgcatcatatacgcagcgaccgcatgacgcaagctgttttactcaaatacacatcacctttttagacggcggcgctcggtttcttcagcggccaagctggccggccaggccgccagcttggcatcagacaaaccggccaggatttcatgcagccgcacggttgagacgtgcgcgggcggctcgaacacgtacccggccgcgatcatctccgcctcgatctcttcggtaatgaaaaacggttcgtcctggccgtcctggtgcggtttcatgcttgttcctcttggcgttcattctcggcggccgccagggcgtcggcctcggtcaatgcgtcctcacggaaggcaccgcgccgcctggcctcggtgggcgtcacttcctcgctgcgctcaagtgcgcggtacagggtcgagcgatgcacgccaagcagtgcagccgcctctttcacggtgcggccttcctggtcgatcagctcgcgggcgtgcgcgatctgtgccggggtgagggtagggcgggggccaaacttcacgcctcgggccttggcggcctcgcgcccgctccgggtgcggtcgatgattagggaacgctcgaactcggcaatgccggcgaacacggtcaacaccatgcggccggccggcgtggtggtgtcggcccacggctctgccaggctacgcaggcccgcgccggcctcctggatgcgctcggcaatgtccagtaggtcgcgggtgctgcgggccaggcggtctagcctggtcactgtcacaacgtcgccagggcgtaggtggtcaagcatcctggccagctccgggcggtcgcgcctggtgccggtgatcttctcggaaaacagcttggtgcagccggccgcgtgcagttcggcccgttggttggtcaagtcctggtcgtcggtgctgacgcgggcatagcccagcaggccagcggcggcgctcttgttcatggcgtaatgtctccggttctagtcgcaagtattctactttatgcgactaaaacacgcgacaagaaaacgccaggaaaagggcagggcggcagcctgtcgcgtaacttaggacttgtgcgacatgtcgttttcagaagacggctgcactgaacgtcagaagccgactgcactatagcagcggaggggttggatcaaagtactttgatcccgaggggaaccctgtggttggcatgcacatacaaatggacgaacggataaaccttttcacgcccttttaaatatccgattattctaataaacgctcttttctcttag

SEQ ID NO: 21 - DNA, 11376 bp, Artificial Sequence
  Synthetic DNA vector
gtttacccgccaatatatcctgtcaaacactgatagtttaaactgaaggcgggaaacgacaatctgatccaagctcaagctgctctagcattcgccattcaggctgcgcaactgttgggaagggcgatcggtgcgggcctcttcgctattacgccagctggcgaaagggggatgtgctgcaaggcgattaagttgggtaacgccagggttttcccagtcacgacgttgtaaaacgacggccagtgccaagcttattaccctgttatccctaaccggttctgagtcacggcttcattggcattccgtacaacgaacgtcccctgcaggcacgtaataagtgtgcgttgaatttattcgcaaaaacattgcatattttcggcaaagtaaaattttgttgcataccttatcaaaaaataagtgctgcatactttttagagaaaccaaataattttttattgcatacccgtttttaataaaatacattgcataccctcttttaataaaaaatattgcatactttgacgaaacaaattttcgttgcatacccaataaaagattattatattgcatacccgtttttaataaaatacattgcataccctcttttaataaaaaatattgcatacgttgacgaaacaaattttcgttgcatacccaataaaagattattatattgcataccttttcttgccataccatttagccgatcaattgtgctcggcatctagagttatcaacaagtttgtacaaaaaagctgaacgagaaacgtaaaatgatataaatatcaatatattaaattagattttgcataaaaaacagactacataatactgtaaaacacaacatatccagtcactatggcggcccctcgaggggccgcattaggcaccccaggctttacactttatgcttccggctcgtataatgtgtggattttgagttaggatccggcgagattttcaggagctaaggaagctaaaatggagaaaaaaatcactggatataccaccgttgatatatcccaatggcatcgtaaagaacattttgaggcatttcagtcagttgctcaatgtacctataaccagaccgttcagctggatattacggcctttttaaagaccgtaaagaaaaataagcacaagttttatccggcctttattcacattcttgcccgcctgatgaatgctcatccggaattccgtatggcaatgaaagacggtgagctggtgatatgggatagtgttcacccttgttacaccgttttccatgagcaaactgaaacgttttcatcgctctggagtgaataccacgacgatttccggcagtttctacacatatattcgcaagatgtggcgtgttacggtgaaaacctggcctatttccctaaagggtttattgagaatatgtttttcgtctcagccaatccctgggtgagtttcaccagttttgatttaaacgtggccaatatggacaacttcttcgcccccgttttcaccatgggcaaatattatacgcaaggcgacaaggtgctgatgccgctggcgattcaggttcatcatgccgtctgtgatggcttccatgtcggcagaatgcttaatgaattacaacagtactgcgatgagtggcagggcggggcgtaaagatctggatccggcttactaaaagccagataacagtatgcgtatttgcgcgctgatttttgcggtataagaatatatactgatatgtatacccgaagtatgtcaaaaagaggtgtgctatgaagcagcgtattacagtgacagttgacagcgacagctatcagttgctcaaggcatatatgatgtcaatatctccggtctggtaagcacaaccatgcagaatgaagcccgtcgtctgcgtgccgaacgctggaaagcggaaaatcaggaagggatggctgaggtcgcccggtttattgaaatgaacggctcttttgctgacgagaacagggactggtgaaatgcagtttaaggtttacacctataaaagagagagccgttatcgtctgtttgtggatgtacagagtgatattattgacacgcccgggcgacggatggtgatccccctggccagtgcacgtctgctgtcagataaagtctcccgtgaactttacccggtggtgcatatcggggatgaaagctggcgcatgatgaccaccgatatggccagtgtgccggtctccgttatcggggaagaagtggctgatctcagccaccgcgaaaatgacatcaaaaacgccattaacctgatgttctggggaatataaatgtcaggctcccttatacacagccagtctgcaggtcgaccatagtgactggatatgttgtgttttacagtattatgtagtctgttttttatgcaaaatctaatttaatatattgatatttatatcattttacgtttctcgttcagctttcttgtacaaagtggttgataacagcgcttagagctctgccgagcacaattgatcggctaaatggtatggcaagaaaaggtatgcaatataataatcttttattgggtatgcaacgaaaatttgtttcgtcaacgtatgcaatattttttattaaaagagggtatgcaatgtattttattaaaaacgggtatgcaatataataatcttttattgggtatgcaacgaaaatttgtttcgtcaaagtatgcaatattttttattaaaagagggtatgcaatgtattttattaaaaacgggtatgcaataaaaaattatttggtttctctaaaaagtatgcagcacttattttttgataaggtatgcaacaaaattttactttgccgaaaatatgcaatgtttttgcgaataaattcaacgcacacttattacgtgggcgcgccttaattaaattaatggtaccggtcctcagagagcctatagcggtaaaacaacaccatgcatccccttaattaatagggataacagggtaatactagtggcgcgcctatttctgaattcccgatctagtaacatagatgacaccgcgcgcgataatttatcctagtttgcgcgctatattttgttttctatcgcgtattaaatgtataattgcgggactctaatcataaaaacccatctcataaataacgtcatgcattacatgttaattattacatgcttaacgtaattcaacagaaattatatgataatcatcgcaagaccggcaacaggattcaatcttaagaaactttattgccaaatgtttgaacgatcggggatcatccgggtctgtggcgggaactccacgaaaatatccgaacgcagcaagatatcgcggtgcatctcggtcttgcctgggcagtcgccgccgacgccgttgatgtggacgccgggcccgatcatattgtcgctcaggatcgtggcgttgtgcttgtcggccgttgctgtcgtaatgatatcggcaccttcgaccgcctgttccgcagagatcccgtgggcgaagaactccagcatgagatccccgcgctggaggatcatccagccggcgtcccggaaaacgattccgaagcccaacctttcatagaaggcggcggtggaatcgaaatctcgtgatggcaggttgggcgtcgcttggtcggtcatttcgaaccccagagtcccgctcagaagaactcgtcaagaaggcgatagaaggcgatgcgctgcgaatcgggagcggcgataccgtaaagcacgaggaagcggtcagcccattcgccgccaagctcttcagcaatatcacgggtagccaacgctatgtcctgatagcggtccgccacacccagccggccacagtcgatgaatccagaaaagcggccattttccaccatgatattcggcaagcaggcatcgccatgggtcacgacgagatcatcgccgtcgggcatgcgcgccttgagcctggcgaacagttcggctggcgcgagcccctgatgctcttcgtccagatcatcctgatcgacaagaccggcttccatccgagtacgtgctcgctcgatgcgatgtttcgcttggtggtcgaatgggcaggtagccggatcaagcgtatgcagccgccgcattgcatcagccatgatggatactttctcggcaggagcaaggtgagatgacaggagatcctgccccggcacttcgcccaatagcagccagtcccttcccgcttcagtgacaacgtcgagcacagctgcgcaaggaacgcccgtcgtggccagccacgatagccgcgctgcctcgtcctgcagttcattcagggcaccggacaggtcggtcttgacaaaaagaaccgggcgcccctgcgctgacagccggaacacggcggcatcagagcagccgattgtctgttgtgcccagtcatagccgaatagcctctccacccaagcggccggagaacctgcgtgcaatccatcttgttcaatcatgcgaaacgatccagatccggtgcagattatttggattgagagtgaatatgagactctaattggataccgaggggaatttatggaacgtcagtggagcatttttgacaagaaatatttgctagctgatagtgaccttaggcgacttttgaacgcgcaataatggtttctgacgtatgtgcttagctcattaaactccagaaacccgcggctgagtggctccttcaacgttgcggttctgtcagttccaaacgtaaaacggcttgtcccgcgtcatcggcgggggtcataacgtgactcccttaattctccgctcatgatgaattcagaaataaattcagcctaattcggcgttaattcagtacattaaaaacgtccgcaatgtgttattaagttgtctaagcgtcaatttgtttacaccacaatatatcctgccaccagccagccaacagctccccgaccggcagctcggcacaaaatcaccactcgatacaggcagcccatcagtccgggacggcgtcagcgggagagccgttgtaaggcggcagactttgctcatgttaccgatgctattcggaagaacggcaactaagctgccgggtttgaaacacggatgatctcgcggagggtagcatgttgattgtaacgatgacagagcgttgctgcctgtgatcaattcgggcacgaacccagtggacataagcctgttcggttcgtaagctgtaatgcaagtagcgtatgcgctcacgcaactggtccagaaccttgaccgaacgcagcggtggtaacggcgcagtggcggttttcatggcttgttatgactgtttttttggggtacagtctatgcctcgggcatccaagcagcaagcgcgttacgccgtgggtcgatgtttgatgttatggagcagcaacgatgttacgcagcagggcagtcgccctaaaacaaagttaaacatcatgggggaagcggtgatcgccgaagtatcgactcaactatcagaggtagttggcgtcatcgagcgccatctcgaaccgacgttgctggccgtacatttgtacggctccgcagtggatggcggcctgaagccacacagtgatattgatttgctggttacggtgaccgtaaggcttgatgaaacaacgcggcgagctttgatcaacgaccttttggaaacttcggcttcccctggagagagcgagattctccgcgctgtagaagtcaccattgttgtgcacgacgacatcattccgtggcgttatccagctaagcgcgaactgcaatttggagaatggcagcgcaatgacattcttgcaggtatcttcgagccagccacgatcgacattgatctggctatcttgctgacaaaagcaagagaacatagcgttgccttggtaggtccagcggcggaggaactctttgatccggttcctgaacaggatctatttgaggcgctaaatgaaaccttaacgctatggaactcgccgcccgactgggctggcgatgagcgaaatgtagtgcttacgttgtcccgcatttggtacagcgcagtaaccggcaaaatcgcgccgaaggatgtcgctgccgactgggcaatggagcgcctgccggcccagtatcagcccgtcatacttgaagctagacaggcttatcttggacaagaagaagatcgcttggcctcgcgcgcagatcagttggaagaatttgtccactacgtgaaaggcgagatcaccaaggtagtcggcaaataatgtctagctagaaattcgttcaagccgacgccgcttcgcggcgcggcttaactcaagcgttagatgcactaagcacataattgctcacagccaaactatcaggtcaagtctgcttttattatttttaagcgtgcataataagccctacacaaattgggagatatatcatgcatgaccaaaatcccttaacgtgagttttcgttccactgagcgtcagaccccgtagaaaagatcaaaggatcttcttgagatcctttttttctgcgcgtaatctgctgcttgcaaacaaaaaaaccaccgctaccagcggtggtttgtttgccggatcaagagctaccaactctttttccgaaggtaactggcttcagcagagcgcagataccaaatactgtccttctagtgtagccgtagttaggccaccacttcaagaactctgtagcaccgcctacatacctcgctctgctaatcctgttaccagtggctgctgccagtggcgataagtcgtgtcttaccgggttggactcaagacgatagttaccggataaggcgcagcggtcgggctgaacggggggttcgtgcacacagcccagcttggagcgaacgacctacaccgaactgagatacctacagcgtgagctatgagaaagcgccacgcttcccgaagggagaaaggcggacaggtatccggtaagcggcagggtcggaacaggagagcgcacgagggagcttccagggggaaacgcctggtatctttatagtcctgtcgggtttcgccacctctgacttgagcgtcgatttttgtgatgctcgtcaggggggcggagcctatggaaaaacgccagcaacgcggcctttttacggttcctggccttttgctggccttttgctcacatgttctttcctgcgttatcccctgattctgtggataaccgtattaccgcctttgagtgagctgataccgctcgccgcagccgaacgaccgagcgcagcgagtcagtgagcgaggaagcggaagagcgcctgatgcggtattttctccttacgcatctgtgcggtatttcacaccgcatatggtgcactctcagtacaatctgctctgatgccgcatagttaagccagtatacactccgctatcgctacgtgactgggtcatggctgcgccccgacacccgccaacacccgctgacgcgccctgacgggcttgtctgctcccggcatccgcttacagacaagctgtgaccgtctccgggagctgcatgtgtcagaggttttcaccgtcatcaccgaaacgcgcgaggcagggtgccttgatgtgggcgccggcggtcgagtggcgacggcgcggcttgtccgcgccctggtagattgcctggccgtaggccagccatttttgagcggccagcggccgcgataggccgacgcgaagcggcggggcgtagggagcgcagcgaccgaagggtaggcgctttttgcagctcttcggctgtgcgctggccagacagttatgcacaggccaggcgggttttaagagttttaataagttttaaagagttttaggcggaaaaatcgccttttttctcttttatatcagtcacttacatgtgtgaccggttcccaatgtacggctttgggttcccaatgtacgggttccggttcccaatgtacggctttgggttcccaatgtacgtgctatccacaggaaagagaccttttcgacctttttcccctgctagggcaatttgccctagcatctgctccgtacattaggaaccggcggatgcttcgccctcgatcaggttgcggtagcgcatgactaggatcgggccagcctgccccgcctcctccttcaaatcgtactccggcaggtcatttgacccgatcagcttgcgcacggtgaaacagaacttcttgaactctccggcgctgccactgcgttcgtagatcgtcttgaacaaccatctggcttctgccttgcctgcggcgcggcgtgccaggcggtagagaaaacggccgatgccgggatcgatcaaaaagtaatcggggtgaaccgtcagcacgtccgggttcttgccttctgtgatctcgcggtacatccaatcagctagctcgatctcgatgtactccggccgcccggtttcgctctttacgatcttgtagcggctaatcaaggcttcaccctcggataccgtcaccaggcggccgttcttggccttcttcgtacgctgcatggcaacgtgcgtggtgtttaaccgaatgcaggtttctaccaggtcgtctttctgctttccgccatcggctcgccggcagaacttgagtacgtccgcaacgtgtggacggaacacgcggccgggcttgtctcccttcccttcccggtatcggttcatggattcggttagatgggaaaccgccatcagtaccaggtcgtaatcccacacactggccatgccggccggccctgcggaaacctctacgtgcccgtctggaagctcgtagcggatcacctcgccagctcgtcggtcacgcttcgacagacggaaaacggccacgtccatgatgctgcgactatcgcgggtgcccacgtcatagagcatcggaacgaaaaaatctggttgctcgtcgcccttgggcggcttcctaatcgacggcgcaccggctgccggcggttgccgggattctttgcggattcgatcagcggccgcttgccacgattcaccggggcgtgcttctgcctcgatgcgttgccgctgggcggcctgcgcggccttcaacttctccaccaggtcatcacccagcgccgcgccgatttgtaccgggccggatggtttgcgaccgctcacgccgattcctcgggcttgggggttccagtgccattgcagggccggcagacaacccagccgcttacgcctggccaaccgcccgttcctccacacatggggcattccacggcgtcggtgcctggttgttcttgattttccatgccgcctcctttagccgctaaaattcatctactcatttattcatttgctcatttactctggtagctgcgcgatgtattcagatagcagctcggtaatggtcttgccttggcgtaccgcgtacatcttcagcttggtgtgatcctccgccggcaactgaaagttgacccgcttcatggctggcgtgtctgccaggctggccaacgttgcagccttgctgctgcgtgcgctcggacggccggcacttagcgtgtttgtgcttttgctcattttctctttacctcattaactcaaatgagttttgatttaatttcagcggccagcgcctggacctcgcgggcagcgtcgccctcgggttctgattcaagaacggttgtgccggcggcggcagtgcctgggtagctcacgcgctgcgtgatacgggactcaagaatgggcagctcgtacccggccagcgcctcggcaacctcaccgccgatgcgcgtgcctttgatcgcccgcgacacgacaaaggccgcttgtagccttccatccgtgacctcaatgcgctgcttaaccagctccaccaggtcggcggtggcccatatgtcgtaagggcttggctgcaccggaatcagcacgaagtcggctgccttgatcgcggacacagccaagtccgccgcctggggcgctccgtcgatcactacgaagtcgcgccggccgatggccttcacgtcgcggtcaatcgtcgggcggtcgatgccgacaacggttagcggttgatcttcccgcacggccgcccaatcgcgggcactgccctggggatcggaatcgactaacagaacatcggccccggcgagttgcagggcgcgggctagatgggttgcgatggtcgtcttgcctgacccgcctttctggttaagtacagcgataaccttcatgcgttccccttgcgtatttgtttatttactcatcgcatcatatacgcagcgaccgcatgacgcaagctgttttactcaaatacacatcacctttttagacggcggcgctcggtttcttcagcggccaagctggccggccaggccgccagcttggcatcagacaaaccggccaggatttcatgcagccgcacggttgagacgtgcgcgggcggctcgaacacgtacccggccgcgatcatctccgcctcgatctcttcggtaatgaaaaacggttcgtcctggccgtcctggtgcggtttcatgcttgttcctcttggcgttcattctcggcggccgccagggcgtcggcctcggtcaatgcgtcctcacggaaggcaccgcgccgcctggcctcggtgggcgtcacttcctcgctgcgctcaagtgcgcggtacagggtcgagcgatgcacgccaagcagtgcagccgcctctttcacggtgcggccttcctggtcgatcagctcgcgggcgtgcgcgatctgtgccggggtgagggtagggcgggggccaaacttcacgcctcgggccttggcggcctcgcgcccgctccgggtgcggtcgatgattagggaacgctcgaactcggcaatgccggcgaacacggtcaacaccatgcggccggccggcgtggtggtgtcggcccacggctctgccaggctacgcaggcccgcgccggcctcctggatgcgctcggcaatgtccagtaggtcgcgggtgctgcgggccaggcggtctagcctggtcactgtcacaacgtcgccagggcgtaggtggtcaagcatcctggccagctccgggcggtcgcgcctggtgccggtgatcttctcggaaaacagcttggtgcagccggccgcgtgcagttcggcccgttggttggtcaagtcctggtcgtcggtgctgacgcgggcatagcccagcaggccagcggcggcgctcttgttcatggcgtaatgtctccggttctagtcgcaagtattctactttatgcgactaaaacacgcgacaagaaaacgccaggaaaagggcagggcggcagcctgtcgcgtaacttaggacttgtgcgacatgtcgttttcagaagacggctgcactgaacgtcagaagccgactgcactatagcagcggaggggttggatcaaagtactttgatcccgaggggaaccctgtggttggcatgcacatacaaatggacgaacggataaaccttttcacgcccttttaaatatccgattattctaataaacgctcttttctcttag

SEQ ID NO: 22 - DNA, 11376 bp, Artificial Sequence
  Synthetic DNA vector
gtttacccgccaatatatcctgtcaaacactgatagtttaaactgaaggcgggaaacgacaatctgatccaagctcaagctgctctagcattcgccattcaggctgcgcaactgttgggaagggcgatcggtgcgggcctcttcgctattacgccagctggcgaaagggggatgtgctgcaaggcgattaagttgggtaacgccagggttttcccagtcacgacgttgtaaaacgacggccagtgccaagcttattaccctgttatccctaaccggtcctcagagagcctatagcggtaaaacaacaccatgcatcccccctgcaggcacgtaataagtgtgcgttgaatttattcgcaaaaacattgcatattttcggcaaagtaaaattttgttgcataccttatcaaaaaataagtgctgcatactttttagagaaaccaaataattttttattgcatacccgtttttaataaaatacattgcataccctcttttaataaaaaatattgcatactttgacgaaacaaattttcgttgcatacccaataaaagattattatattgcatacccgtttttaataaaatacattgcataccctcttttaataaaaaatattgcatacgttgacgaaacaaattttcgttgcatacccaataaaagattattatattgcataccttttcttgccataccatttagccgatcaattgtgctcggcatctagagttatcaacaagtttgtacaaaaaagctgaacgagaaacgtaaaatgatataaatatcaatatattaaattagattttgcataaaaaacagactacataatactgtaaaacacaacatatccagtcactatggcggcccctcgaggggccgcattaggcaccccaggctttacactttatgcttccggctcgtataatgtgtggattttgagttaggatccggcgagattttcaggagctaaggaagctaaaatggagaaaaaaatcactggatataccaccgttgatatatcccaatggcatcgtaaagaacattttgaggcatttcagtcagttgctcaatgtacctataaccagaccgttcagctggatattacggcctttttaaagaccgtaaagaaaaataagcacaagttttatccggcctttattcacattcttgcccgcctgatgaatgctcatccggaattccgtatggcaatgaaagacggtgagctggtgatatgggatagtgttcacccttgttacaccgttttccatgagcaaactgaaacgttttcatcgctctggagtgaataccacgacgatttccggcagtttctacacatatattcgcaagatgtggcgtgttacggtgaaaacctggcctatttccctaaagggtttattgagaatatgtttttcgtctcagccaatccctgggtgagtttcaccagttttgatttaaacgtggccaatatggacaacttcttcgcccccgttttcaccatgggcaaatattatacgcaaggcgacaaggtgctgatgccgctggcgattcaggttcatcatgccgtctgtgatggcttccatgtcggcagaatgcttaatgaattacaacagtactgcgatgagtggcagggcggggcgtaaagatctggatccggcttactaaaagccagataacagtatgcgtatttgcgcgctgatttttgcggtataagaatatatactgatatgtatacccgaagtatgtcaaaaagaggtgtgctatgaagcagcgtattacagtgacagttgacagcgacagctatcagttgctcaaggcatatatgatgtcaatatctccggtctggtaagcacaaccatgcagaatgaagcccgtcgtctgcgtgccgaacgctggaaagcggaaaatcaggaagggatggctgaggtcgcccggtttattgaaatgaacggctcttttgctgacgagaacagggactggtgaaatgcagtttaaggtttacacctataaaagagagagccgttatcgtctgtttgtggatgtacagagtgatattattgacacgcccgggcgacggatggtgatccccctggccagtgcacgtctgctgtcagataaagtctcccgtgaactttacccggtggtgcatatcggggatgaaagctggcgcatgatgaccaccgatatggccagtgtgccggtctccgttatcggggaagaagtggctgatctcagccaccgcgaaaatgacatcaaaaacgccattaacctgatgttctggggaatataaatgtcaggctcccttatacacagccagtctgcaggtcgaccatagtgactggatatgttgtgttttacagtattatgtagtctgttttttatgcaaaatctaatttaatatattgatatttatatcattttacgtttctcgttcagctttcttgtacaaagtggttgataacagcgcttagagctctgccgagcacaattgatcggctaaatggtatggcaagaaaaggtatgcaatataataatcttttattgggtatgcaacgaaaatttgtttcgtcaacgtatgcaatattttttattaaaagagggtatgcaatgtattttattaaaaacgggtatgcaatataataatcttttattgggtatgcaacgaaaatttgtttcgtcaaagtatgcaatattttttattaaaagagggtatgcaatgtattttattaaaaacgggtatgcaataaaaaattatttggtttctctaaaaagtatgcagcacttattttttgataaggtatgcaacaaaattttactttgccgaaaatatgcaatgtttttgcgaataaattcaacgcacacttattacgtgggcgcgccttaattaaattaatggtaccggtcgcagtcgcttcctgtaaatagagcattaaattccatagtccttaattaatagggataacagggtaatactagtggcgcgcctatttctgaattcccgatctagtaacatagatgacaccgcgcgcgataatttatcctagtttgcgcgctatattttgttttctatcgcgtattaaatgtataattgcgggactctaatcataaaaacccatctcataaataacgtcatgcattacatgttaattattacatgcttaacgtaattcaacagaaattatatgataatcatcgcaagaccggcaacaggattcaatcttaagaaactttattgccaaatgtttgaacgatcggggatcatccgggtctgtggcgggaactccacgaaaatatccgaacgcagcaagatatcgcggtgcatctcggtcttgcctgggcagtcgccgccgacgccgttgatgtggacgccgggcccgatcatattgtcgctcaggatcgtggcgttgtgcttgtcggccgttgctgtcgtaatgatatcggcaccttcgaccgcctgttccgcagagatcccgtgggcgaagaactccagcatgagatccccgcgctggaggatcatccagccggcgtcccggaaaacgattccgaagcccaacctttcatagaaggcggcggtggaatcgaaatctcgtgatggcaggttgggcgtcgcttggtcggtcatttcgaaccccagagtcccgctcagaagaactcgtcaagaaggcgatagaaggcgatgcgctgcgaatcgggagcggcgataccgtaaagcacgaggaagcggtcagcccattcgccgccaagctcttcagcaatatcacgggtagccaacgctatgtcctgatagcggtccgccacacccagccggccacagtcgatgaatccagaaaagcggccattttccaccatgatattcggcaagcaggcatcgccatgggtcacgacgagatcatcgccgtcgggcatgcgcgccttgagcctggcgaacagttcggctggcgcgagcccctgatgctcttcgtccagatcatcctgatcgacaagaccggcttccatccgagtacgtgctcgctcgatgcgatgtttcgcttggtggtcgaatgggcaggtagccggatcaagcgtatgcagccgccgcattgcatcagccatgatggatactttctcggcaggagcaaggtgagatgacaggagatcctgccccggcacttcgcccaatagcagccagtcccttcccgcttcagtgacaacgtcgagcacagctgcgcaaggaacgcccgtcgtggccagccacgatagccgcgctgcctcgtcctgcagttcattcagggcaccggacaggtcggtcttgacaaaaagaaccgggcgcccctgcgctgacagccggaacacggcggcatcagagcagccgattgtctgttgtgcccagtcatagccgaatagcctctccacccaagcggccggagaacctgcgtgcaatccatcttgttcaatcatgcgaaacgatccagatccggtgcagattatttggattgagagtgaatatgagactctaattggataccgaggggaatttatggaacgtcagtggagcatttttgacaagaaatatttgctagctgatagtgaccttaggcgacttttgaacgcgcaataatggtttctgacgtatgtgcttagctcattaaactccagaaacccgcggctgagtggctccttcaacgttgcggttctgtcagttccaaacgtaaaacggcttgtcccgcgtcatcggcgggggtcataacgtgactcccttaattctccgctcatgatgaattcagaaataaattcagcctaattcggcgttaattcagtacattaaaaacgtccgcaatgtgttattaagttgtctaagcgtcaatttgtttacaccacaatatatcctgccaccagccagccaacagctccccgaccggcagctcggcacaaaatcaccactcgatacaggcagcccatcagtccgggacggcgtcagcgggagagccgttgtaaggcggcagactttgctcatgttaccgatgctattcggaagaacggcaactaagctgccgggtttgaaacacggatgatctcgcggagggtagcatgttgattgtaacgatgacagagcgttgctgcctgtgatcaattcgggcacgaacccagtggacataagcctgttcggttcgtaagctgtaatgcaagtagcgtatgcgctcacgcaactggtccagaaccttgaccgaacgcagcggtggtaacggcgcagtggcggttttcatggcttgttatgactgtttttttggggtacagtctatgcctcgggcatccaagcagcaagcgcgttacgccgtgggtcgatgtttgatgttatggagcagcaacgatgttacgcagcagggcagtcgccctaaaacaaagttaaacatcatgggggaagcggtgatcgccgaagtatcgactcaactatcagaggtagttggcgtcatcgagcgccatctcgaaccgacgttgctggccgtacatttgtacggctccgcagtggatggcggcctgaagccacacagtgatattgatttgctggttacggtgaccgtaaggcttgatgaaacaacgcggcgagctttgatcaacgaccttttggaaacttcggcttcccctggagagagcgagattctccgcgctgtagaagtcaccattgttgtgcacgacgacatcattccgtggcgttatccagctaagcgcgaactgcaatttggagaatggcagcgcaatgacattcttgcaggtatcttcgagccagccacgatcgacattgatctggctatcttgctgacaaaagcaagagaacatagcgttgccttggtaggtccagcggcggaggaactctttgatccggttcctgaacaggatctatttgaggcgctaaatgaaaccttaacgctatggaactcgccgcccgactgggctggcgatgagcgaaatgtagtgcttacgttgtcccgcatttggtacagcgcagtaaccggcaaaatcgcgccgaaggatgtcgctgccgactgggcaatggagcgcctgccggcccagtatcagcccgtcatacttgaagctagacaggcttatcttggacaagaagaagatcgcttggcctcgcgcgcagatcagttggaagaatttgtccactacgtgaaaggcgagatcaccaaggtagtcggcaaataatgtctagctagaaattcgttcaagccgacgccgcttcgcggcgcggcttaactcaagcgttagatgcactaagcacataattgctcacagccaaactatcaggtcaagtctgcttttattatttttaagcgtgcataataagccctacacaaattgggagatatatcatgcatgaccaaaatcccttaacgtgagttttcgttccactgagcgtcagaccccgtagaaaagatcaaaggatcttcttgagatcctttttttctgcgcgtaatctgctgcttgcaaacaaaaaaaccaccgctaccagcggtggtttgtttgccggatcaagagctaccaactctttttccgaaggtaactggcttcagcagagcgcagataccaaatactgtccttctagtgtagccgtagttaggccaccacttcaagaactctgtagcaccgcctacatacctcgctctgctaatcctgttaccagtggctgctgccagtggcgataagtcgtgtcttaccgggttggactcaagacgatagttaccggataaggcgcagcggtcgggctgaacggggggttcgtgcacacagcccagcttggagcgaacgacctacaccgaactgagatacctacagcgtgagctatgagaaagcgccacgcttcccgaagggagaaaggcggacaggtatccggtaagcggcagggtcggaacaggagagcgcacgagggagcttccagggggaaacgcctggtatctttatagtcctgtcgggtttcgccacctctgacttgagcgtcgatttttgtgatgctcgtcaggggggcggagcctatggaaaaacgccagcaacgcggcctttttacggttcctggccttttgctggccttttgctcacatgttctttcctgcgttatcccctgattctgtggataaccgtattaccgcctttgagtgagctgataccgctcgccgcagccgaacgaccgagcgcagcgagtcagtgagcgaggaagcggaagagcgcctgatgcggtattttctccttacgcatctgtgcggtatttcacaccgcatatggtgcactctcagtacaatctgctctgatgccgcatagttaagccagtatacactccgctatcgctacgtgactgggtcatggctgcgccccgacacccgccaacacccgctgacgcgccctgacgggcttgtctgctcccggcatccgcttacagacaagctgtgaccgtctccgggagctgcatgtgtcagaggttttcaccgtcatcaccgaaacgcgcgaggcagggtgccttgatgtgggcgccggcggtcgagtggcgacggcgcggcttgtccgcgccctggtagattgcctggccgtaggccagccatttttgagcggccagcggccgcgataggccgacgcgaagcggcggggcgtagggagcgcagcgaccgaagggtaggcgctttttgcagctcttcggctgtgcgctggccagacagttatgcacaggccaggcgggttttaagagttttaataagttttaaagagttttaggcggaaaaatcgccttttttctcttttatatcagtcacttacatgtgtgaccggttcccaatgtacggctttgggttcccaatgtacgggttccggttcccaatgtacggctttgggttcccaatgtacgtgctatccacaggaaagagaccttttcgacctttttcccctgctagggcaatttgccctagcatctgctccgtacattaggaaccggcggatgcttcgccctcgatcaggttgcggtagcgcatgactaggatcgggccagcctgccccgcctcctccttcaaatcgtactccggcaggtcatttgacccgatcagcttgcgcacggtgaaacagaacttcttgaactctccggcgctgccactgcgttcgtagatcgtcttgaacaaccatctggcttctgccttgcctgcggcgcggcgtgccaggcggtagagaaaacggccgatgccgggatcgatcaaaaagtaatcggggtgaaccgtcagcacgtccgggttcttgccttctgtgatctcgcggtacatccaatcagctagctcgatctcgatgtactccggccgcccggtttcgctctttacgatcttgtagcggctaatcaaggcttcaccctcggataccgtcaccaggcggccgttcttggccttcttcgtacgctgcatggcaacgtgcgtggtgtttaaccgaatgcaggtttctaccaggtcgtctttctgctttccgccatcggctcgccggcagaacttgagtacgtccgcaacgtgtggacggaacacgcggccgggcttgtctcccttcccttcccggtatcggttcatggattcggttagatgggaaaccgccatcagtaccaggtcgtaatcccacacactggccatgccggccggccctgcggaaacctctacgtgcccgtctggaagctcgtagcggatcacctcgccagctcgtcggtcacgcttcgacagacggaaaacggccacgtccatgatgctgcgactatcgcgggtgcccacgtcatagagcatcggaacgaaaaaatctggttgctcgtcgcccttgggcggcttcctaatcgacggcgcaccggctgccggcggttgccgggattctttgcggattcgatcagcggccgcttgccacgattcaccggggcgtgcttctgcctcgatgcgttgccgctgggcggcctgcgcggccttcaacttctccaccaggtcatcacccagcgccgcgccgatttgtaccgggccggatggtttgcgaccgctcacgccgattcctcgggcttgggggttccagtgccattgcagggccggcagacaacccagccgcttacgcctggccaaccgcccgttcctccacacatggggcattccacggcgtcggtgcctggttgttcttgattttccatgccgcctcctttagccgctaaaattcatctactcatttattcatttgctcatttactctggtagctgcgcgatgtattcagatagcagctcggtaatggtcttgccttggcgtaccgcgtacatcttcagcttggtgtgatcctccgccggcaactgaaagttgacccgcttcatggctggcgtgtctgccaggctggccaacgttgcagccttgctgctgcgtgcgctcggacggccggcacttagcgtgtttgtgcttttgctcattttctctttacctcattaactcaaatgagttttgatttaatttcagcggccagcgcctggacctcgcgggcagcgtcgccctcgggttctgattcaagaacggttgtgccggcggcggcagtgcctgggtagctcacgcgctgcgtgatacgggactcaagaatgggcagctcgtacccggccagcgcctcggcaacctcaccgccgatgcgcgtgcctttgatcgcccgcgacacgacaaaggccgcttgtagccttccatccgtgacctcaatgcgctgcttaaccagctccaccaggtcggcggtggcccatatgtcgtaagggcttggctgcaccggaatcagcacgaagtcggctgccttgatcgcggacacagccaagtccgccgcctggggcgctccgtcgatcactacgaagtcgcgccggccgatggccttcacgtcgcggtcaatcgtcgggcggtcgatgccgacaacggttagcggttgatcttcccgcacggccgcccaatcgcgggcactgccctggggatcggaatcgactaacagaacatcggccccggcgagttgcagggcgcgggctagatgggttgcgatggtcgtcttgcctgacccgcctttctggttaagtacagcgataaccttcatgcgttccccttgcgtatttgtttatttactcatcgcatcatatacgcagcgaccgcatgacgcaagctgttttactcaaatacacatcacctttttagacggcggcgctcggtttcttcagcggccaagctggccggccaggccgccagcttggcatcagacaaaccggccaggatttcatgcagccgcacggttgagacgtgcgcgggcggctcgaacacgtacccggccgcgatcatctccgcctcgatctcttcggtaatgaaaaacggttcgtcctggccgtcctggtgcggtttcatgcttgttcctcttggcgttcattctcggcggccgccagggcgtcggcctcggtcaatgcgtcctcacggaaggcaccgcgccgcctggcctcggtgggcgtcacttcctcgctgcgctcaagtgcgcggtacagggtcgagcgatgcacgccaagcagtgcagccgcctctttcacggtgcggccttcctggtcgatcagctcgcgggcgtgcgcgatctgtgccggggtgagggtagggcgggggccaaacttcacgcctcgggccttggcggcctcgcgcccgctccgggtgcggtcgatgattagggaacgctcgaactcggcaatgccggcgaacacggtcaacaccatgcggccggccggcgtggtggtgtcggcccacggctctgccaggctacgcaggcccgcgccggcctcctggatgcgctcggcaatgtccagtaggtcgcgggtgctgcgggccaggcggtctagcctggtcactgtcacaacgtcgccagggcgtaggtggtcaagcatcctggccagctccgggcggtcgcgcctggtgccggtgatcttctcggaaaacagcttggtgcagccggccgcgtgcagttcggcccgttggttggtcaagtcctggtcgtcggtgctgacgcgggcatagcccagcaggccagcggcggcgctcttgttcatggcgtaatgtctccggttctagtcgcaagtattctactttatgcgactaaaacacgcgacaagaaaacgccaggaaaagggcagggcggcagcctgtcgcgtaacttaggacttgtgcgacatgtcgttttcagaagacggctgcactgaacgtcagaagccgactgcactatagcagcggaggggttggatcaaagtactttgatcccgaggggaaccctgtggttggcatgcacatacaaatggacgaacggataaaccttttcacgcccttttaaatatccgattattctaataaacgctcttttctcttag

SEQ ID NO: 23 - DNA, 11376 bp, Artificial Sequence
  Synthetic DNA vector
gtttacccgccaatatatcctgtcaaacactgatagtttaaactgaaggcgggaaacgacaatctgatccaagctcaagctgctctagcattcgccattcaggctgcgcaactgttgggaagggcgatcggtgcgggcctcttcgctattacgccagctggcgaaagggggatgtgctgcaaggcgattaagttgggtaacgccagggttttcccagtcacgacgttgtaaaacgacggccagtgccaagcttattaccctgttatccctaaccggtcgcagtcgcttcctgtaaatagagcattaaattccatagtcccctgcaggcacgtaataagtgtgcgttgaatttattcgcaaaaacattgcatattttcggcaaagtaaaattttgttgcataccttatcaaaaaataagtgctgcatactttttagagaaaccaaataattttttattgcatacccgtttttaataaaatacattgcataccctcttttaataaaaaatattgcatactttgacgaaacaaattttcgttgcatacccaataaaagattattatattgcatacccgtttttaataaaatacattgcataccctcttttaataaaaaatattgcatacgttgacgaaacaaattttcgttgcatacccaataaaagattattatattgcataccttttcttgccataccatttagccgatcaattgtgctcggcatctagagttatcaacaagtttgtacaaaaaagctgaacgagaaacgtaaaatgatataaatatcaatatattaaattagattttgcataaaaaacagactacataatactgtaaaacacaacatatccagtcactatggcggcccctcgaggggccgcattaggcaccccaggctttacactttatgcttccggctcgtataatgtgtggattttgagttaggatccggcgagattttcaggagctaaggaagctaaaatggagaaaaaaatcactggatataccaccgttgatatatcccaatggcatcgtaaagaacattttgaggcatttcagtcagttgctcaatgtacctataaccagaccgttcagctggatattacggcctttttaaagaccgtaaagaaaaataagcacaagttttatccggcctttattcacattcttgcccgcctgatgaatgctcatccggaattccgtatggcaatgaaagacggtgagctggtgatatgggatagtgttcacccttgttacaccgttttccatgagcaaactgaaacgttttcatcgctctggagtgaataccacgacgatttccggcagtttctacacatatattcgcaagatgtggcgtgttacggtgaaaacctggcctatttccctaaagggtttattgagaatatgtttttcgtctcagccaatccctgggtgagtttcaccagttttgatttaaacgtggccaatatggacaacttcttcgcccccgttttcaccatgggcaaatattatacgcaaggcgacaaggtgctgatgccgctggcgattcaggttcatcatgccgtctgtgatggcttccatgtcggcagaatgcttaatgaattacaacagtactgcgatgagtggcagggcggggcgtaaagatctggatccggcttactaaaagccagataacagtatgcgtatttgcgcgctgatttttgcggtataagaatatatactgatatgtatacccgaagtatgtcaaaaagaggtgtgctatgaagcagcgtattacagtgacagttgacagcgacagctatcagttgctcaaggcatatatgatgtcaatatctccggtctggtaagcacaaccatgcagaatgaagcccgtcgtctgcgtgccgaacgctggaaagcggaaaatcaggaagggatggctgaggtcgcccggtttattgaaatgaacggctcttttgctgacgagaacagggactggtgaaatgcagtttaaggtttacacctataaaagagagagccgttatcgtctgtttgtggatgtacagagtgatattattgacacgcccgggcgacggatggtgatccccctggccagtgcacgtctgctgtcagataaagtctcccgtgaactttacccggtggtgcatatcggggatgaaagctggcgcatgatgaccaccgatatggccagtgtgccggtctccgttatcggggaagaagtggctgatctcagccaccgcgaaaatgacatcaaaaacgccattaacctgatgttctggggaatataaatgtcaggctcccttatacacagccagtctgcaggtcgaccatagtgactggatatgttgtgttttacagtattatgtagtctgttttttatgcaaaatctaatttaatatattgatatttatatcattttacgtttctcgttcagctttcttgtacaaagtggttgataacagcgcttagagctctgccgagcacaattgatcggctaaatggtatggcaagaaaaggtatgcaatataataatcttttattgggtatgcaacgaaaatttgtttcgtcaacgtatgcaatattttttattaaaagagggtatgcaatgtattttattaaaaacgggtatgcaatataataatcttttattgggtatgcaacgaaaatttgtttcgtcaaagtatgcaatattttttattaaaagagggtatgcaatgtattttattaaaaacgggtatgcaataaaaaattatttggtttctctaaaaagtatgcagcacttattttttgataaggtatgcaacaaaattttactttgccgaaaatatgcaatgtttttgcgaataaattcaacgcacacttattacgtgggcgcgccttaattaaattaatggtaccggtacttaatcgaaaaaaaaacagacagccatgtgctcttcggccttaattaatagggataacagggtaatactagtggcgcgcctatttctgaattcccgatctagtaacatagatgacaccgcgcgcgataatttatcctagtttgcgcgctatattttgttttctatcgcgtattaaatgtataattgcgggactctaatcataaaaacccatctcataaataacgtcatgcattacatgttaattattacatgcttaacgtaattcaacagaaattatatgataatcatcgcaagaccggcaacaggattcaatcttaagaaactttattgccaaatgtttgaacgatcggggatcatccgggtctgtggcgggaactccacgaaaatatccgaacgcagcaagatatcgcggtgcatctcggtcttgcctgggcagtcgccgccgacgccgttgatgtggacgccgggcccgatcatattgtcgctcaggatcgtggcgttgtgcttgtcggccgttgctgtcgtaatgatatcggcaccttcgaccgcctgttccgcagagatcccgtgggcgaagaactccagcatgagatccccgcgctggaggatcatccagccggcgtcccggaaaacgattccgaagcccaacctttcatagaaggcggcggtggaatcgaaatctcgtgatggcaggttgggcgtcgcttggtcggtcatttcgaaccccagagtcccgctcagaagaactcgtcaagaaggcgatagaaggcgatgcgctgcgaatcgggagcggcgataccgtaaagcacgaggaagcggtcagcccattcgccgccaagctcttcagcaatatcacgggtagccaacgctatgtcctgatagcggtccgccacacccagccggccacagtcgatgaatccagaaaagcggccattttccaccatgatattcggcaagcaggcatcgccatgggtcacgacgagatcatcgccgtcgggcatgcgcgccttgagcctggcgaacagttcggctggcgcgagcccctgatgctcttcgtccagatcatcctgatcgacaagaccggcttccatccgagtacgtgctcgctcgatgcgatgtttcgcttggtggtcgaatgggcaggtagccggatcaagcgtatgcagccgccgcattgcatcagccatgatggatactttctcggcaggagcaaggtgagatgacaggagatcctgccccggcacttcgcccaatagcagccagtcccttcccgcttcagtgacaacgtcgagcacagctgcgcaaggaacgcccgtcgtggccagccacgatagccgcgctgcctcgtcctgcagttcattcagggcaccggacaggtcggtcttgacaaaaagaaccgggcgcccctgcgctgacagccggaacacggcggcatcagagcagccgattgtctgttgtgcccagtcatagccgaatagcctctccacccaagcggccggagaacctgcgtgcaatccatcttgttcaatcatgcgaaacgatccagatccggtgcagattatttggattgagagtgaatatgagactctaattggataccgaggggaatttatggaacgtcagtggagcatttttgacaagaaatatttgctagctgatagtgaccttaggcgacttttgaacgcgcaataatggtttctgacgtatgtgcttagctcattaaactccagaaacccgcggctgagtggctccttcaacgttgcggttctgtcagttccaaacgtaaaacggcttgtcccgcgtcatcggcgggggtcataacgtgactcccttaattctccgctcatgatgaattcagaaataaattcagcctaattcggcgttaattcagtacattaaaaacgtccgcaatgtgttattaagttgtctaagcgtcaatttgtttacaccacaatatatcctgccaccagccagccaacagctccccgaccggcagctcggcacaaaatcaccactcgatacaggcagcccatcagtccgggacggcgtcagcgggagagccgttgtaaggcggcagactttgctcatgttaccgatgctattcggaagaacggcaactaagctgccgggtttgaaacacggatgatctcgcggagggtagcatgttgattgtaacgatgacagagcgttgctgcctgtgatcaattcgggcacgaacccagtggacataagcctgttcggttcgtaagctgtaatgcaagtagcgtatgcgctcacgcaactggtccagaaccttgaccgaacgcagcggtggtaacggcgcagtggcggttttcatggcttgttatgactgtttttttggggtacagtctatgcctcgggcatccaagcagcaagcgcgttacgccgtgggtcgatgtttgatgttatggagcagcaacgatgttacgcagcagggcagtcgccctaaaacaaagttaaacatcatgggggaagcggtgatcgccgaagtatcgactcaactatcagaggtagttggcgtcatcgagcgccatctcgaaccgacgttgctggccgtacatttgtacggctccgcagtggatggcggcctgaagccacacagtgatattgatttgctggttacggtgaccgtaaggcttgatgaaacaacgcggcgagctttgatcaacgaccttttggaaacttcggcttcccctggagagagcgagattctccgcgctgtagaagtcaccattgttgtgcacgacgacatcattccgtggcgttatccagctaagcgcgaactgcaatttggagaatggcagcgcaatgacattcttgcaggtatcttcgagccagccacgatcgacattgatctggctatcttgctgacaaaagcaagagaacatagcgttgccttggtaggtccagcggcggaggaactctttgatccggttcctgaacaggatctatttgaggcgctaaatgaaaccttaacgctatggaactcgccgcccgactgggctggcgatgagcgaaatgtagtgcttacgttgtcccgcatttggtacagcgcagtaaccggcaaaatcgcgccgaaggatgtcgctgccgactgggcaatggagcgcctgccggcccagtatcagcccgtcatacttgaagctagacaggcttatcttggacaagaagaagatcgcttggcctcgcgcgcagatcagttggaagaatttgtccactacgtgaaaggcgagatcaccaaggtagtcggcaaataatgtctagctagaaattcgttcaagccgacgccgcttcgcggcgcggcttaactcaagcgttagatgcactaagcacataattgctcacagccaaactatcaggtcaagtctgcttttattatttttaagcgtgcataataagccctacacaaattgggagatatatcatgcatgaccaaaatcccttaacgtgagttttcgttccactgagcgtcagaccccgtagaaaagatcaaaggatcttcttgagatcctttttttctgcgcgtaatctgctgcttgcaaacaaaaaaaccaccgctaccagcggtggtttgtttgccggatcaagagctaccaactctttttccgaaggtaactggcttcagcagagcgcagataccaaatactgtccttctagtgtagccgtagttaggccaccacttcaagaactctgtagcaccgcctacatacctcgctctgctaatcctgttaccagtggctgctgccagtggcgataagtcgtgtcttaccgggttggactcaagacgatagttaccggataaggcgcagcggtcgggctgaacggggggttcgtgcacacagcccagcttggagcgaacgacctacaccgaactgagatacctacagcgtgagctatgagaaagcgccacgcttcccgaagggagaaaggcggacaggtatccggtaagcggcagggtcggaacaggagagcgcacgagggagcttccagggggaaacgcctggtatctttatagtcctgtcgggtttcgccacctctgacttgagcgtcgatttttgtgatgctcgtcaggggggcggagcctatggaaaaacgccagcaacgcggcctttttacggttcctggccttttgctggccttttgctcacatgttctttcctgcgttatcccctgattctgtggataaccgtattaccgcctttgagtgagctgataccgctcgccgcagccgaacgaccgagcgcagcgagtcagtgagcgaggaagcggaagagcgcctgatgcggtattttctccttacgcatctgtgcggtatttcacaccgcatatggtgcactctcagtacaatctgctctgatgccgcatagttaagccagtatacactccgctatcgctacgtgactgggtcatggctgcgccccgacacccgccaacacccgctgacgcgccctgacgggcttgtctgctcccggcatccgcttacagacaagctgtgaccgtctccgggagctgcatgtgtcagaggttttcaccgtcatcaccgaaacgcgcgaggcagggtgccttgatgtgggcgccggcggtcgagtggcgacggcgcggcttgtccgcgccctggtagattgcctggccgtaggccagccatttttgagcggccagcggccgcgataggccgacgcgaagcggcggggcgtagggagcgcagcgaccgaagggtaggcgctttttgcagctcttcggctgtgcgctggccagacagttatgcacaggccaggcgggttttaagagttttaataagttttaaagagttttaggcggaaaaatcgccttttttctcttttatatcagtcacttacatgtgtgaccggttcccaatgtacggctttgggttcccaatgtacgggttccggttcccaatgtacggctttgggttcccaatgtacgtgctatccacaggaaagagaccttttcgacctttttcccctgctagggcaatttgccctagcatctgctccgtacattaggaaccggcggatgcttcgccctcgatcaggttgcggtagcgcatgactaggatcgggccagcctgccccgcctcctccttcaaatcgtactccggcaggtcatttgacccgatcagcttgcgcacggtgaaacagaacttcttgaactctccggcgctgccactgcgttcgtagatcgtcttgaacaaccatctggcttctgccttgcctgcggcgcggcgtgccaggcggtagagaaaacggccgatgccgggatcgatcaaaaagtaatcggggtgaaccgtcagcacgtccgggttcttgccttctgtgatctcgcggtacatccaatcagctagctcgatctcgatgtactccggccgcccggtttcgctctttacgatcttgtagcggctaatcaaggcttcaccctcggataccgtcaccaggcggccgttcttggccttcttcgtacgctgcatggcaacgtgcgtggtgtttaaccgaatgcaggtttctaccaggtcgtctttctgctttccgccatcggctcgccggcagaacttgagtacgtccgcaacgtgtggacggaacacgcggccgggcttgtctcccttcccttcccggtatcggttcatggattcggttagatgggaaaccgccatcagtaccaggtcgtaatcccacacactggccatgccggccggccctgcggaaacctctacgtgcccgtctggaagctcgtagcggatcacctcgccagctcgtcggtcacgcttcgacagacggaaaacggccacgtccatgatgctgcgactatcgcgggtgcccacgtcatagagcatcggaacgaaaaaatctggttgctcgtcgcccttgggcggcttcctaatcgacggcgcaccggctgccggcggttgccgggattctttgcggattcgatcagcggccgcttgccacgattcaccggggcgtgcttctgcctcgatgcgttgccgctgggcggcctgcgcggccttcaacttctccaccaggtcatcacccagcgccgcgccgatttgtaccgggccggatggtttgcgaccgctcacgccgattcctcgggcttgggggttccagtgccattgcagggccggcagacaacccagccgcttacgcctggccaaccgcccgttcctccacacatggggcattccacggcgtcggtgcctggttgttcttgattttccatgccgcctcctttagccgctaaaattcatctactcatttattcatttgctcatttactctggtagctgcgcgatgtattcagatagcagctcggtaatggtcttgccttggcgtaccgcgtacatcttcagcttggtgtgatcctccgccggcaactgaaagttgacccgcttcatggctggcgtgtctgccaggctggccaacgttgcagccttgctgctgcgtgcgctcggacggccggcacttagcgtgtttgtgcttttgctcattttctctttacctcattaactcaaatgagttttgatttaatttcagcggccagcgcctggacctcgcgggcagcgtcgccctcgggttctgattcaagaacggttgtgccggcggcggcagtgcctgggtagctcacgcgctgcgtgatacgggactcaagaatgggcagctcgtacccggccagcgcctcggcaacctcaccgccgatgcgcgtgcctttgatcgcccgcgacacgacaaaggccgcttgtagccttccatccgtgacctcaatgcgctgcttaaccagctccaccaggtcggcggtggcccatatgtcgtaagggcttggctgcaccggaatcagcacgaagtcggctgccttgatcgcggacacagccaagtccgccgcctggggcgctccgtcgatcactacgaagtcgcgccggccgatggccttcacgtcgcggtcaatcgtcgggcggtcgatgccgacaacggttagcggttgatcttcccgcacggccgcccaatcgcgggcactgccctggggatcggaatcgactaacagaacatcggccccggcgagttgcagggcgcgggctagatgggttgcgatggtcgtcttgcctgacccgcctttctggttaagtacagcgataaccttcatgcgttccccttgcgtatttgtttatttactcatcgcatcatatacgcagcgaccgcatgacgcaagctgttttactcaaatacacatcacctttttagacggcggcgctcggtttcttcagcggccaagctggccggccaggccgccagcttggcatcagacaaaccggccaggatttcatgcagccgcacggttgagacgtgcgcgggcggctcgaacacgtacccggccgcgatcatctccgcctcgatctcttcggtaatgaaaaacggttcgtcctggccgtcctggtgcggtttcatgcttgttcctcttggcgttcattctcggcggccgccagggcgtcggcctcggtcaatgcgtcctcacggaaggcaccgcgccgcctggcctcggtgggcgtcacttcctcgctgcgctcaagtgcgcggtacagggtcgagcgatgcacgccaagcagtgcagccgcctctttcacggtgcggccttcctggtcgatcagctcgcgggcgtgcgcgatctgtgccggggtgagggtagggcgggggccaaacttcacgcctcgggccttggcggcctcgcgcccgctccgggtgcggtcgatgattagggaacgctcgaactcggcaatgccggcgaacacggtcaacaccatgcggccggccggcgtggtggtgtcggcccacggctctgccaggctacgcaggcccgcgccggcctcctggatgcgctcggcaatgtccagtaggtcgcgggtgctgcgggccaggcggtctagcctggtcactgtcacaacgtcgccagggcgtaggtggtcaagcatcctggccagctccgggcggtcgcgcctggtgccggtgatcttctcggaaaacagcttggtgcagccggccgcgtgcagttcggcccgttggttggtcaagtcctggtcgtcggtgctgacgcgggcatagcccagcaggccagcggcggcgctcttgttcatggcgtaatgtctccggttctagtcgcaagtattctactttatgcgactaaaacacgcgacaagaaaacgccaggaaaagggcagggcggcagcctgtcgcgtaacttaggacttgtgcgacatgtcgttttcagaagacggctgcactgaacgtcagaagccgactgcactatagcagcggaggggttggatcaaagtactttgatcccgaggggaaccctgtggttggcatgcacatacaaatggacgaacggataaaccttttcacgcccttttaaatatccgattattctaataaacgctcttttctcttag

SEQ ID NO: 24 - DNA, 11376 bp, Artificial Sequence
  Synthetic DNA vector
gtttacccgccaatatatcctgtcaaacactgatagtttaaactgaaggcgggaaacgacaatctgatccaagctcaagctgctctagcattcgccattcaggctgcgcaactgttgggaagggcgatcggtgcgggcctcttcgctattacgccagctggcgaaagggggatgtgctgcaaggcgattaagttgggtaacgccagggttttcccagtcacgacgttgtaaaacgacggccagtgccaagcttattaccctgttatccctaaccggtacttaatcgaaaaaaaaacagacagccatgtgctcttcggcccctgcaggcacgtaataagtgtgcgttgaatttattcgcaaaaacattgcatattttcggcaaagtaaaattttgttgcataccttatcaaaaaataagtgctgcatactttttagagaaaccaaataattttttattgcatacccgtttttaataaaatacattgcataccctcttttaataaaaaatattgcatactttgacgaaacaaattttcgttgcatacccaataaaagattattatattgcatacccgtttttaataaaatacattgcataccctcttttaataaaaaatattgcatacgttgacgaaacaaattttcgttgcatacccaataaaagattattatattgcataccttttcttgccataccatttagccgatcaattgtgctcggcatctagagttatcaacaagtttgtacaaaaaagctgaacgagaaacgtaaaatgatataaatatcaatatattaaattagattttgcataaaaaacagactacataatactgtaaaacacaacatatccagtcactatggcggcccctcgaggggccgcattaggcaccccaggctttacactttatgcttccggctcgtataatgtgtggattttgagttaggatccggcgagattttcaggagctaaggaagctaaaatggagaaaaaaatcactggatataccaccgttgatatatcccaatggcatcgtaaagaacattttgaggcatttcagtcagttgctcaatgtacctataaccagaccgttcagctggatattacggcctttttaaagaccgtaaagaaaaataagcacaagttttatccggcctttattcacattcttgcccgcctgatgaatgctcatccggaattccgtatggcaatgaaagacggtgagctggtgatatgggatagtgttcacccttgttacaccgttttccatgagcaaactgaaacgttttcatcgctctggagtgaataccacgacgatttccggcagtttctacacatatattcgcaagatgtggcgtgttacggtgaaaacctggcctatttccctaaagggtttattgagaatatgtttttcgtctcagccaatccctgggtgagtttcaccagttttgatttaaacgtggccaatatggacaacttcttcgcccccgttttcaccatgggcaaatattatacgcaaggcgacaaggtgctgatgccgctggcgattcaggttcatcatgccgtctgtgatggcttccatgtcggcagaatgcttaatgaattacaacagtactgcgatgagtggcagggcggggcgtaaagatctggatccggcttactaaaagccagataacagtatgcgtatttgcgcgctgatttttgcggtataagaatatatactgatatgtatacccgaagtatgtcaaaaagaggtgtgctatgaagcagcgtattacagtgacagttgacagcgacagctatcagttgctcaaggcatatatgatgtcaatatctccggtctggtaagcacaaccatgcagaatgaagcccgtcgtctgcgtgccgaacgctggaaagcggaaaatcaggaagggatggctgaggtcgcccggtttattgaaatgaacggctcttttgctgacgagaacagggactggtgaaatgcagtttaaggtttacacctataaaagagagagccgttatcgtctgtttgtggatgtacagagtgatattattgacacgcccgggcgacggatggtgatccccctggccagtgcacgtctgctgtcagataaagtctcccgtgaactttacccggtggtgcatatcggggatgaaagctggcgcatgatgaccaccgatatggccagtgtgccggtctccgttatcggggaagaagtggctgatctcagccaccgcgaaaatgacatcaaaaacgccattaacctgatgttctggggaatataaatgtcaggctcccttatacacagccagtctgcaggtcgaccatagtgactggatatgttgtgttttacagtattatgtagtctgttttttatgcaaaatctaatttaatatattgatatttatatcattttacgtttctcgttcagctttcttgtacaaagtggttgataacagcgcttagagctctgccgagcacaattgatcggctaaatggtatggcaagaaaaggtatgcaatataataatcttttattgggtatgcaacgaaaatttgtttcgtcaacgtatgcaatattttttattaaaagagggtatgcaatgtattttattaaaaacgggtatgcaatataataatcttttattgggtatgcaacgaaaatttgtttcgtcaaagtatgcaatattttttattaaaagagggtatgcaatgtattttattaaaaacgggtatgcaataaaaaattatttggtttctctaaaaagtatgcagcacttattttttgataaggtatgcaacaaaattttactttgccgaaaatatgcaatgtttttgcgaataaattcaacgcacacttattacgtgggcgcgccttaattaaattaatggtaccggtggacatgattatggaacacacacacgctagccgcccagttccttaattaatagggataacagggtaatactagtggcgcgcctatttctgaattcccgatctagtaacatagatgacaccgcgcgcgataatttatcctagtttgcgcgctatattttgttttctatcgcgtattaaatgtataattgcgggactctaatcataaaaacccatctcataaataacgtcatgcattacatgttaattattacatgcttaacgtaattcaacagaaattatatgataatcatcgcaagaccggcaacaggattcaatcttaagaaactttattgccaaatgtttgaacgatcggggatcatccgggtctgtggcgggaactccacgaaaatatccgaacgcagcaagatatcgcggtgcatctcggtcttgcctgggcagtcgccgccgacgccgttgatgtggacgccgggcccgatcatattgtcgctcaggatcgtggcgttgtgcttgtcggccgttgctgtcgtaatgatatcggcaccttcgaccgcctgttccgcagagatcccgtgggcgaagaactccagcatgagatccccgcgctggaggatcatccagccggcgtcccggaaaacgattccgaagcccaacctttcatagaaggcggcggtggaatcgaaatctcgtgatggcaggttgggcgtcgcttggtcggtcatttcgaaccccagagtcccgctcagaagaactcgtcaagaaggcgatagaaggcgatgcgctgcgaatcgggagcggcgataccgtaaagcacgaggaagcggtcagcccattcgccgccaagctcttcagcaatatcacgggtagccaacgctatgtcctgatagcggtccgccacacccagccggccacagtcgatgaatccagaaaagcggccattttccaccatgatattcggcaagcaggcatcgccatgggtcacgacgagatcatcgccgtcgggcatgcgcgccttgagcctggcgaacagttcggctggcgcgagcccctgatgctcttcgtccagatcatcctgatcgacaagaccggcttccatccgagtacgtgctcgctcgatgcgatgtttcgcttggtggtcgaatgggcaggtagccggatcaagcgtatgcagccgccgcattgcatcagccatgatggatactttctcggcaggagcaaggtgagatgacaggagatcctgccccggcacttcgcccaatagcagccagtcccttcccgcttcagtgacaacgtcgagcacagctgcgcaaggaacgcccgtcgtggccagccacgatagccgcgctgcctcgtcctgcagttcattcagggcaccggacaggtcggtcttgacaaaaagaaccgggcgcccctgcgctgacagccggaacacggcggcatcagagcagccgattgtctgttgtgcccagtcatagccgaatagcctctccacccaagcggccggagaacctgcgtgcaatccatcttgttcaatcatgcgaaacgatccagatccggtgcagattatttggattgagagtgaatatgagactctaattggataccgaggggaatttatggaacgtcagtggagcatttttgacaagaaatatttgctagctgatagtgaccttaggcgacttttgaacgcgcaataatggtttctgacgtatgtgcttagctcattaaactccagaaacccgcggctgagtggctccttcaacgttgcggttctgtcagttccaaacgtaaaacggcttgtcccgcgtcatcggcgggggtcataacgtgactcccttaattctccgctcatgatgaattcagaaataaattcagcctaattcggcgttaattcagtacattaaaaacgtccgcaatgtgttattaagttgtctaagcgtcaatttgtttacaccacaatatatcctgccaccagccagccaacagctccccgaccggcagctcggcacaaaatcaccactcgatacaggcagcccatcagtccgggacggcgtcagcgggagagccgttgtaaggcggcagactttgctcatgttaccgatgctattcggaagaacggcaactaagctgccgggtttgaaacacggatgatctcgcggagggtagcatgttgattgtaacgatgacagagcgttgctgcctgtgatcaattcgggcacgaacccagtggacataagcctgttcggttcgtaagctgtaatgcaagtagcgtatgcgctcacgcaactggtccagaaccttgaccgaacgcagcggtggtaacggcgcagtggcggttttcatggcttgttatgactgtttttttggggtacagtctatgcctcgggcatccaagcagcaagcgcgttacgccgtgggtcgatgtttgatgttatggagcagcaacgatgttacgcagcagggcagtcgccctaaaacaaagttaaacatcatgggggaagcggtgatcgccgaagtatcgactcaactatcagaggtagttggcgtcatcgagcgccatctcgaaccgacgttgctggccgtacatttgtacggctccgcagtggatggcggcctgaagccacacagtgatattgatttgctggttacggtgaccgtaaggcttgatgaaacaacgcggcgagctttgatcaacgaccttttggaaacttcggcttcccctggagagagcgagattctccgcgctgtagaagtcaccattgttgtgcacgacgacatcattccgtggcgttatccagctaagcgcgaactgcaatttggagaatggcagcgcaatgacattcttgcaggtatcttcgagccagccacgatcgacattgatctggctatcttgctgacaaaagcaagagaacatagcgttgccttggtaggtccagcggcggaggaactctttgatccggttcctgaacaggatctatttgaggcgctaaatgaaaccttaacgctatggaactcgccgcccgactgggctggcgatgagcgaaatgtagtgcttacgttgtcccgcatttggtacagcgcagtaaccggcaaaatcgcgccgaaggatgtcgctgccgactgggcaatggagcgcctgccggcccagtatcagcccgtcatacttgaagctagacaggcttatcttggacaagaagaagatcgcttggcctcgcgcgcagatcagttggaagaatttgtccactacgtgaaaggcgagatcaccaaggtagtcggcaaataatgtctagctagaaattcgttcaagccgacgccgcttcgcggcgcggcttaactcaagcgttagatgcactaagcacataattgctcacagccaaactatcaggtcaagtctgcttttattatttttaagcgtgcataataagccctacacaaattgggagatatatcatgcatgaccaaaatcccttaacgtgagttttcgttccactgagcgtcagaccccgtagaaaagatcaaaggatcttcttgagatcctttttttctgcgcgtaatctgctgcttgcaaacaaaaaaaccaccgctaccagcggtggtttgtttgccggatcaagagctaccaactctttttccgaaggtaactggcttcagcagagcgcagataccaaatactgtccttctagtgtagccgtagttaggccaccacttcaagaactctgtagcaccgcctacatacctcgctctgctaatcctgttaccagtggctgctgccagtggcgataagtcgtgtcttaccgggttggactcaagacgatagttaccggataaggcgcagcggtcgggctgaacggggggttcgtgcacacagcccagcttggagcgaacgacctacaccgaactgagatacctacagcgtgagctatgagaaagcgccacgcttcccgaagggagaaaggcggacaggtatccggtaagcggcagggtcggaacaggagagcgcacgagggagcttccagggggaaacgcctggtatctttatagtcctgtcgggtttcgccacctctgacttgagcgtcgatttttgtgatgctcgtcaggggggcggagcctatggaaaaacgccagcaacgcggcctttttacggttcctggccttttgctggccttttgctcacatgttctttcctgcgttatcccctgattctgtggataaccgtattaccgcctttgagtgagctgataccgctcgccgcagccgaacgaccgagcgcagcgagtcagtgagcgaggaagcggaagagcgcctgatgcggtattttctccttacgcatctgtgcggtatttcacaccgcatatggtgcactctcagtacaatctgctctgatgccgcatagttaagccagtatacactccgctatcgctacgtgactgggtcatggctgcgccccgacacccgccaacacccgctgacgcgccctgacgggcttgtctgctcccggcatccgcttacagacaagctgtgaccgtctccgggagctgcatgtgtcagaggttttcaccgtcatcaccgaaacgcgcgaggcagggtgccttgatgtgggcgccggcggtcgagtggcgacggcgcggcttgtccgcgccctggtagattgcctggccgtaggccagccatttttgagcggccagcggccgcgataggccgacgcgaagcggcggggcgtagggagcgcagcgaccgaagggtaggcgctttttgcagctcttcggctgtgcgctggccagacagttatgcacaggccaggcgggttttaagagttttaataagttttaaagagttttaggcggaaaaatcgccttttttctcttttatatcagtcacttacatgtgtgaccggttcccaatgtacggctttgggttcccaatgtacgggttccggttcccaatgtacggctttgggttcccaatgtacgtgctatccacaggaaagagaccttttcgacctttttcccctgctagggcaatttgccctagcatctgctccgtacattaggaaccggcggatgcttcgccctcgatcaggttgcggtagcgcatgactaggatcgggccagcctgccccgcctcctccttcaaatcgtactccggcaggtcatttgacccgatcagcttgcgcacggtgaaacagaacttcttgaactctccggcgctgccactgcgttcgtagatcgtcttgaacaaccatctggcttctgccttgcctgcggcgcggcgtgccaggcggtagagaaaacggccgatgccgggatcgatcaaaaagtaatcggggtgaaccgtcagcacgtccgggttcttgccttctgtgatctcgcggtacatccaatcagctagctcgatctcgatgtactccggccgcccggtttcgctctttacgatcttgtagcggctaatcaaggcttcaccctcggataccgtcaccaggcggccgttcttggccttcttcgtacgctgcatggcaacgtgcgtggtgtttaaccgaatgcaggtttctaccaggtcgtctttctgctttccgccatcggctcgccggcagaacttgagtacgtccgcaacgtgtggacggaacacgcggccgggcttgtctcccttcccttcccggtatcggttcatggattcggttagatgggaaaccgccatcagtaccaggtcgtaatcccacacactggccatgccggccggccctgcggaaacctctacgtgcccgtctggaagctcgtagcggatcacctcgccagctcgtcggtcacgcttcgacagacggaaaacggccacgtccatgatgctgcgactatcgcgggtgcccacgtcatagagcatcggaacgaaaaaatctggttgctcgtcgcccttgggcggcttcctaatcgacggcgcaccggctgccggcggttgccgggattctttgcggattcgatcagcggccgcttgccacgattcaccggggcgtgcttctgcctcgatgcgttgccgctgggcggcctgcgcggccttcaacttctccaccaggtcatcacccagcgccgcgccgatttgtaccgggccggatggtttgcgaccgctcacgccgattcctcgggcttgggggttccagtgccattgcagggccggcagacaacccagccgcttacgcctggccaaccgcccgttcctccacacatggggcattccacggcgtcggtgcctggttgttcttgattttccatgccgcctcctttagccgctaaaattcatctactcatttattcatttgctcatttactctggtagctgcgcgatgtattcagatagcagctcggtaatggtcttgccttggcgtaccgcgtacatcttcagcttggtgtgatcctccgccggcaactgaaagttgacccgcttcatggctggcgtgtctgccaggctggccaacgttgcagccttgctgctgcgtgcgctcggacggccggcacttagcgtgtttgtgcttttgctcattttctctttacctcattaactcaaatgagttttgatttaatttcagcggccagcgcctggacctcgcgggcagcgtcgccctcgggttctgattcaagaacggttgtgccggcggcggcagtgcctgggtagctcacgcgctgcgtgatacgggactcaagaatgggcagctcgtacccggccagcgcctcggcaacctcaccgccgatgcgcgtgcctttgatcgcccgcgacacgacaaaggccgcttgtagccttccatccgtgacctcaatgcgctgcttaaccagctccaccaggtcggcggtggcccatatgtcgtaagggcttggctgcaccggaatcagcacgaagtcggctgccttgatcgcggacacagccaagtccgccgcctggggcgctccgtcgatcactacgaagtcgcgccggccgatggccttcacgtcgcggtcaatcgtcgggcggtcgatgccgacaacggttagcggttgatcttcccgcacggccgcccaatcgcgggcactgccctggggatcggaatcgactaacagaacatcggccccggcgagttgcagggcgcgggctagatgggttgcgatggtcgtcttgcctgacccgcctttctggttaagtacagcgataaccttcatgcgttccccttgcgtatttgtttatttactcatcgcatcatatacgcagcgaccgcatgacgcaagctgttttactcaaatacacatcacctttttagacggcggcgctcggtttcttcagcggccaagctggccggccaggccgccagcttggcatcagacaaaccggccaggatttcatgcagccgcacggttgagacgtgcgcgggcggctcgaacacgtacccggccgcgatcatctccgcctcgatctcttcggtaatgaaaaacggttcgtcctggccgtcctggtgcggtttcatgcttgttcctcttggcgttcattctcggcggccgccagggcgtcggcctcggtcaatgcgtcctcacggaaggcaccgcgccgcctggcctcggtgggcgtcacttcctcgctgcgctcaagtgcgcggtacagggtcgagcgatgcacgccaagcagtgcagccgcctctttcacggtgcggccttcctggtcgatcagctcgcgggcgtgcgcgatctgtgccggggtgagggtagggcgggggccaaacttcacgcctcgggccttggcggcctcgcgcccgctccgggtgcggtcgatgattagggaacgctcgaactcggcaatgccggcgaacacggtcaacaccatgcggccggccggcgtggtggtgtcggcccacggctctgccaggctacgcaggcccgcgccggcctcctggatgcgctcggcaatgtccagtaggtcgcgggtgctgcgggccaggcggtctagcctggtcactgtcacaacgtcgccagggcgtaggtggtcaagcatcctggccagctccgggcggtcgcgcctggtgccggtgatcttctcggaaaacagcttggtgcagccggccgcgtgcagttcggcccgttggttggtcaagtcctggtcgtcggtgctgacgcgggcatagcccagcaggccagcggcggcgctcttgttcatggcgtaatgtctccggttctagtcgcaagtattctactttatgcgactaaaacacgcgacaagaaaacgccaggaaaagggcagggcggcagcctgtcgcgtaacttaggacttgtgcgacatgtcgttttcagaagacggctgcactgaacgtcagaagccgactgcactatagcagcggaggggttggatcaaagtactttgatcccgaggggaaccctgtggttggcatgcacatacaaatggacgaacggataaaccttttcacgcccttttaaatatccgattattctaataaacgctcttttctcttag

SEQ ID NO: 25 - DNA, 11376 bp, Artificial Sequence
  Synthetic DNA vector
gtttacccgccaatatatcctgtcaaacactgatagtttaaactgaaggcgggaaacgacaatctgatccaagctcaagctgctctagcattcgccattcaggctgcgcaactgttgggaagggcgatcggtgcgggcctcttcgctattacgccagctggcgaaagggggatgtgctgcaaggcgattaagttgggtaacgccagggttttcccagtcacgacgttgtaaaacgacggccagtgccaagcttattaccctgttatccctaaccggtggacatgattatggaacacacacacgctagccgcccagttcccctgcaggcacgtaataagtgtgcgttgaatttattcgcaaaaacattgcatattttcggcaaagtaaaattttgttgcataccttatcaaaaaataagtgctgcatactttttagagaaaccaaataattttttattgcatacccgtttttaataaaatacattgcataccctcttttaataaaaaatattgcatactttgacgaaacaaattttcgttgcatacccaataaaagattattatattgcatacccgtttttaataaaatacattgcataccctcttttaataaaaaatattgcatacgttgacgaaacaaattttcgttgcatacccaataaaagattattatattgcataccttttcttgccataccatttagccgatcaattgtgctcggcatctagagttatcaacaagtttgtacaaaaaagctgaacgagaaacgtaaaatgatataaatatcaatatattaaattagattttgcataaaaaacagactacataatactgtaaaacacaacatatccagtcactatggcggcccctcgaggggccgcattaggcaccccaggctttacactttatgcttccggctcgtataatgtgtggattttgagttaggatccggcgagattttcaggagctaaggaagctaaaatggagaaaaaaatcactggatataccaccgttgatatatcccaatggcatcgtaaagaacattttgaggcatttcagtcagttgctcaatgtacctataaccagaccgttcagctggatattacggcctttttaaagaccgtaaagaaaaataagcacaagttttatccggcctttattcacattcttgcccgcctgatgaatgctcatccggaattccgtatggcaatgaaagacggtgagctggtgatatgggatagtgttcacccttgttacaccgttttccatgagcaaactgaaacgttttcatcgctctggagtgaataccacgacgatttccggcagtttctacacatatattcgcaagatgtggcgtgttacggtgaaaacctggcctatttccctaaagggtttattgagaatatgtttttcgtctcagccaatccctgggtgagtttcaccagttttgatttaaacgtggccaatatggacaacttcttcgcccccgttttcaccatgggcaaatattatacgcaaggcgacaaggtgctgatgccgctggcgattcaggttcatcatgccgtctgtgatggcttccatgtcggcagaatgcttaatgaattacaacagtactgcgatgagtggcagggcggggcgtaaagatctggatccggcttactaaaagccagataacagtatgcgtatttgcgcgctgatttttgcggtataagaatatatactgatatgtatacccgaagtatgtcaaaaagaggtgtgctatgaagcagcgtattacagtgacagttgacagcgacagctatcagttgctcaaggcatatatgatgtcaatatctccggtctggtaagcacaaccatgcagaatgaagcccgtcgtctgcgtgccgaacgctggaaagcggaaaatcaggaagggatggctgaggtcgcccggtttattgaaatgaacggctcttttgctgacgagaacagggactggtgaaatgcagtttaaggtttacacctataaaagagagagccgttatcgtctgtttgtggatgtacagagtgatattattgacacgcccgggcgacggatggtgatccccctggccagtgcacgtctgctgtcagataaagtctcccgtgaactttacccggtggtgcatatcggggatgaaagctggcgcatgatgaccaccgatatggccagtgtgccggtctccgttatcggggaagaagtggctgatctcagccaccgcgaaaatgacatcaaaaacgccattaacctgatgttctggggaatataaatgtcaggctcccttatacacagccagtctgcaggtcgaccatagtgactggatatgttgtgttttacagtattatgtagtctgttttttatgcaaaatctaatttaatatattgatatttatatcattttacgtttctcgttcagctttcttgtacaaagtggttgataacagcgcttagagctctgccgagcacaattgatcggctaaatggtatggcaagaaaaggtatgcaatataataatcttttattgggtatgcaacgaaaatttgtttcgtcaacgtatgcaatattttttattaaaagagggtatgcaatgtattttattaaaaacgggtatgcaatataataatcttttattgggtatgcaacgaaaatttgtttcgtcaaagtatgcaatattttttattaaaagagggtatgcaatgtattttattaaaaacgggtatgcaataaaaaattatttggtttctctaaaaagtatgcagcacttattttttgataaggtatgcaacaaaattttactttgccgaaaatatgcaatgtttttgcgaataaattcaacgcacacttattacgtgggcgcgccttaattaaattaatggtaccggtgagcccaaacagcgaaatacctgagcgaacaaatactactccttaattaatagggataacagggtaatactagtggcgcgcctatttctgaattcccgatctagtaacatagatgacaccgcgcgcgataatttatcctagtttgcgcgctatattttgttttctatcgcgtattaaatgtataattgcgggactctaatcataaaaacccatctcataaataacgtcatgcattacatgttaattattacatgcttaacgtaattcaacagaaattatatgataatcatcgcaagaccggcaacaggattcaatcttaagaaactttattgccaaatgtttgaacgatcggggatcatccgggtctgtggcgggaactccacgaaaatatccgaacgcagcaagatatcgcggtgcatctcggtcttgcctgggcagtcgccgccgacgccgttgatgtggacgccgggcccgatcatattgtcgctcaggatcgtggcgttgtgcttgtcggccgttgctgtcgtaatgatatcggcaccttcgaccgcctgttccgcagagatcccgtgggcgaagaactccagcatgagatccccgcgctggaggatcatccagccggcgtcccggaaaacgattccgaagcccaacctttcatagaaggcggcggtggaatcgaaatctcgtgatggcaggttgggcgtcgcttggtcggtcatttcgaaccccagagtcccgctcagaagaactcgtcaagaaggcgatagaaggcgatgcgctgcgaatcgggagcggcgataccgtaaagcacgaggaagcggtcagcccattcgccgccaagctcttcagcaatatcacgggtagccaacgctatgtcctgatagcggtccgccacacccagccggccacagtcgatgaatccagaaaagcggccattttccaccatgatattcggcaagcaggcatcgccatgggtcacgacgagatcatcgccgtcgggcatgcgcgccttgagcctggcgaacagttcggctggcgcgagcccctgatgctcttcgtccagatcatcctgatcgacaagaccggcttccatccgagtacgtgctcgctcgatgcgatgtttcgcttggtggtcgaatgggcaggtagccggatcaagcgtatgcagccgccgcattgcatcagccatgatggatactttctcggcaggagcaaggtgagatgacaggagatcctgccccggcacttcgcccaatagcagccagtcccttcccgcttcagtgacaacgtcgagcacagctgcgcaaggaacgcccgtcgtggccagccacgatagccgcgctgcctcgtcctgcagttcattcagggcaccggacaggtcggtcttgacaaaaagaaccgggcgcccctgcgctgacagccggaacacggcggcatcagagcagccgattgtctgttgtgcccagtcatagccgaatagcctctccacccaagcggccggagaacctgcgtgcaatccatcttgttcaatcatgcgaaacgatccagatccggtgcagattatttggattgagagtgaatatgagactctaattggataccgaggggaatttatggaacgtcagtggagcatttttgacaagaaatatttgctagctgatagtgaccttaggcgacttttgaacgcgcaataatggtttctgacgtatgtgcttagctcattaaactccagaaacccgcggctgagtggctccttcaacgttgcggttctgtcagttccaaacgtaaaacggcttgtcccgcgtcatcggcgggggtcataacgtgactcccttaattctccgctcatgatgaattcagaaataaattcagcctaattcggcgttaattcagtacattaaaaacgtccgcaatgtgttattaagttgtctaagcgtcaatttgtttacaccacaatatatcctgccaccagccagccaacagctccccgaccggcagctcggcacaaaatcaccactcgatacaggcagcccatcagtccgggacggcgtcagcgggagagccgttgtaaggcggcagactttgctcatgttaccgatgctattcggaagaacggcaactaagctgccgggtttgaaacacggatgatctcgcggagggtagcatgttgattgtaacgatgacagagcgttgctgcctgtgatcaattcgggcacgaacccagtggacataagcctgttcggttcgtaagctgtaatgcaagtagcgtatgcgctcacgcaactggtccagaaccttgaccgaacgcagcggtggtaacggcgcagtggcggttttcatggcttgttatgactgtttttttggggtacagtctatgcctcgggcatccaagcagcaagcgcgttacgccgtgggtcgatgtttgatgttatggagcagcaacgatgttacgcagcagggcagtcgccctaaaacaaagttaaacatcatgggggaagcggtgatcgccgaagtatcgactcaactatcagaggtagttggcgtcatcgagcgccatctcgaaccgacgttgctggccgtacatttgtacggctccgcagtggatggcggcctgaagccacacagtgatattgatttgctggttacggtgaccgtaaggcttgatgaaacaacgcggcgagctttgatcaacgaccttttggaaacttcggcttcccctggagagagcgagattctccgcgctgtagaagtcaccattgttgtgcacgacgacatcattccgtggcgttatccagctaagcgcgaactgcaatttggagaatggcagcgcaatgacattcttgcaggtatcttcgagccagccacgatcgacattgatctggctatcttgctgacaaaagcaagagaacatagcgttgccttggtaggtccagcggcggaggaactctttgatccggttcctgaacaggatctatttgaggcgctaaatgaaaccttaacgctatggaactcgccgcccgactgggctggcgatgagcgaaatgtagtgcttacgttgtcccgcatttggtacagcgcagtaaccggcaaaatcgcgccgaaggatgtcgctgccgactgggcaatggagcgcctgccggcccagtatcagcccgtcatacttgaagctagacaggcttatcttggacaagaagaagatcgcttggcctcgcgcgcagatcagttggaagaatttgtccactacgtgaaaggcgagatcaccaaggtagtcggcaaataatgtctagctagaaattcgttcaagccgacgccgcttcgcggcgcggcttaactcaagcgttagatgcactaagcacataattgctcacagccaaactatcaggtcaagtctgcttttattatttttaagcgtgcataataagccctacacaaattgggagatatatcatgcatgaccaaaatcccttaacgtgagttttcgttccactgagcgtcagaccccgtagaaaagatcaaaggatcttcttgagatcctttttttctgcgcgtaatctgctgcttgcaaacaaaaaaaccaccgctaccagcggtggtttgtttgccggatcaagagctaccaactctttttccgaaggtaactggcttcagcagagcgcagataccaaatactgtccttctagtgtagccgtagttaggccaccacttcaagaactctgtagcaccgcctacatacctcgctctgctaatcctgttaccagtggctgctgccagtggcgataagtcgtgtcttaccgggttggactcaagacgatagttaccggataaggcgcagcggtcgggctgaacggggggttcgtgcacacagcccagcttggagcgaacgacctacaccgaactgagatacctacagcgtgagctatgagaaagcgccacgcttcccgaagggagaaaggcggacaggtatccggtaagcggcagggtcggaacaggagagcgcacgagggagcttccagggggaaacgcctggtatctttatagtcctgtcgggtttcgccacctctgacttgagcgtcgatttttgtgatgctcgtcaggggggcggagcctatggaaaaacgccagcaacgcggcctttttacggttcctggccttttgctggccttttgctcacatgttctttcctgcgttatcccctgattctgtggataaccgtattaccgcctttgagtgagctgataccgctcgccgcagccgaacgaccgagcgcagcgagtcagtgagcgaggaagcggaagagcgcctgatgcggtattttctccttacgcatctgtgcggtatttcacaccgcatatggtgcactctcagtacaatctgctctgatgccgcatagttaagccagtatacactccgctatcgctacgtgactgggtcatggctgcgccccgacacccgccaacacccgctgacgcgccctgacgggcttgtctgctcccggcatccgcttacagacaagctgtgaccgtctccgggagctgcatgtgtcagaggttttcaccgtcatcaccgaaacgcgcgaggcagggtgccttgatgtgggcgccggcggtcgagtggcgacggcgcggcttgtccgcgccctggtagattgcctggccgtaggccagccatttttgagcggccagcggccgcgataggccgacgcgaagcggcggggcgtagggagcgcagcgaccgaagggtaggcgctttttgcagctcttcggctgtgcgctggccagacagttatgcacaggccaggcgggttttaagagttttaataagttttaaagagttttaggcggaaaaatcgccttttttctcttttatatcagtcacttacatgtgtgaccggttcccaatgtacggctttgggttcccaatgtacgggttccggttcccaatgtacggctttgggttcccaatgtacgtgctatccacaggaaagagaccttttcgacctttttcccctgctagggcaatttgccctagcatctgctccgtacattaggaaccggcggatgcttcgccctcgatcaggttgcggtagcgcatgactaggatcgggccagcctgccccgcctcctccttcaaatcgtactccggcaggtcatttgacccgatcagcttgcgcacggtgaaacagaacttcttgaactctccggcgctgccactgcgttcgtagatcgtcttgaacaaccatctggcttctgccttgcctgcggcgcggcgtgccaggcggtagagaaaacggccgatgccgggatcgatcaaaaagtaatcggggtgaaccgtcagcacgtccgggttcttgccttctgtgatctcgcggtacatccaatcagctagctcgatctcgatgtactccggccgcccggtttcgctctttacgatcttgtagcggctaatcaaggcttcaccctcggataccgtcaccaggcggccgttcttggccttcttcgtacgctgcatggcaacgtgcgtggtgtttaaccgaatgcaggtttctaccaggtcgtctttctgctttccgccatcggctcgccggcagaacttgagtacgtccgcaacgtgtggacggaacacgcggccgggcttgtctcccttcccttcccggtatcggttcatggattcggttagatgggaaaccgccatcagtaccaggtcgtaatcccacacactggccatgccggccggccctgcggaaacctctacgtgcccgtctggaagctcgtagcggatcacctcgccagctcgtcggtcacgcttcgacagacggaaaacggccacgtccatgatgctgcgactatcgcgggtgcccacgtcatagagcatcggaacgaaaaaatctggttgctcgtcgcccttgggcggcttcctaatcgacggcgcaccggctgccggcggttgccgggattctttgcggattcgatcagcggccgcttgccacgattcaccggggcgtgcttctgcctcgatgcgttgccgctgggcggcctgcgcggccttcaacttctccaccaggtcatcacccagcgccgcgccgatttgtaccgggccggatggtttgcgaccgctcacgccgattcctcgggcttgggggttccagtgccattgcagggccggcagacaacccagccgcttacgcctggccaaccgcccgttcctccacacatggggcattccacggcgtcggtgcctggttgttcttgattttccatgccgcctcctttagccgctaaaattcatctactcatttattcatttgctcatttactctggtagctgcgcgatgtattcagatagcagctcggtaatggtcttgccttggcgtaccgcgtacatcttcagcttggtgtgatcctccgccggcaactgaaagttgacccgcttcatggctggcgtgtctgccaggctggccaacgttgcagccttgctgctgcgtgcgctcggacggccggcacttagcgtgtttgtgcttttgctcattttctctttacctcattaactcaaatgagttttgatttaatttcagcggccagcgcctggacctcgcgggcagcgtcgccctcgggttctgattcaagaacggttgtgccggcggcggcagtgcctgggtagctcacgcgctgcgtgatacgggactcaagaatgggcagctcgtacccggccagcgcctcggcaacctcaccgccgatgcgcgtgcctttgatcgcccgcgacacgacaaaggccgcttgtagccttccatccgtgacctcaatgcgctgcttaaccagctccaccaggtcggcggtggcccatatgtcgtaagggcttggctgcaccggaatcagcacgaagtcggctgccttgatcgcggacacagccaagtccgccgcctggggcgctccgtcgatcactacgaagtcgcgccggccgatggccttcacgtcgcggtcaatcgtcgggcggtcgatgccgacaacggttagcggttgatcttcccgcacggccgcccaatcgcgggcactgccctggggatcggaatcgactaacagaacatcggccccggcgagttgcagggcgcgggctagatgggttgcgatggtcgtcttgcctgacccgcctttctggttaagtacagcgataaccttcatgcgttccccttgcgtatttgtttatttactcatcgcatcatatacgcagcgaccgcatgacgcaagctgttttactcaaatacacatcacctttttagacggcggcgctcggtttcttcagcggccaagctggccggccaggccgccagcttggcatcagacaaaccggccaggatttcatgcagccgcacggttgagacgtgcgcgggcggctcgaacacgtacccggccgcgatcatctccgcctcgatctcttcggtaatgaaaaacggttcgtcctggccgtcctggtgcggtttcatgcttgttcctcttggcgttcattctcggcggccgccagggcgtcggcctcggtcaatgcgtcctcacggaaggcaccgcgccgcctggcctcggtgggcgtcacttcctcgctgcgctcaagtgcgcggtacagggtcgagcgatgcacgccaagcagtgcagccgcctctttcacggtgcggccttcctggtcgatcagctcgcgggcgtgcgcgatctgtgccggggtgagggtagggcgggggccaaacttcacgcctcgggccttggcggcctcgcgcccgctccgggtgcggtcgatgattagggaacgctcgaactcggcaatgccggcgaacacggtcaacaccatgcggccggccggcgtggtggtgtcggcccacggctctgccaggctacgcaggcccgcgccggcctcctggatgcgctcggcaatgtccagtaggtcgcgggtgctgcgggccaggcggtctagcctggtcactgtcacaacgtcgccagggcgtaggtggtcaagcatcctggccagctccgggcggtcgcgcctggtgccggtgatcttctcggaaaacagcttggtgcagccggccgcgtgcagttcggcccgttggttggtcaagtcctggtcgtcggtgctgacgcgggcatagcccagcaggccagcggcggcgctcttgttcatggcgtaatgtctccggttctagtcgcaagtattctactttatgcgactaaaacacgcgacaagaaaacgccaggaaaagggcagggcggcagcctgtcgcgtaacttaggacttgtgcgacatgtcgttttcagaagacggctgcactgaacgtcagaagccgactgcactatagcagcggaggggttggatcaaagtactttgatcccgaggggaaccctgtggttggcatgcacatacaaatggacgaacggataaaccttttcacgcccttttaaatatccgattattctaataaacgctcttttctcttag

SEQ ID NO: 26 - DNA, 5408 bp, Artificial Sequence
  Synthetic DNA vector
aagcttggtgcgtttttatgcttgtagtattgtataatgtttttaagatccttaattaaggtgcgtttttatgcttgtagtattgtataatgtttttaagatcctagggataacagggtaatgagctcggatccactagtaacggccgccagtgtgctggaattcccgatctagtaacatagatgacaccgcgcgcgataatttatcctagtttgcgcgctatattttgttttctatcgcgtattaaatgtataattgcgggactctaatcataaaaacccatctcataaataacgtcatgcattacatgttaattattacatgcttaacgtaattcaacagaaattatatgataatcatcgcaagaccggcaacaggattcaatcttaagaaactttattgccaaatgtttgaacgatcggggatcatccgggtctgtggcgggaactccacgaaaatatccgaacgcagcaagatatcgcggtgcatctcggtcttgcctgggcagtcgccgccgacgccgttgatgtggacgccgggcccgatcatattgtcgctcaggatcgtggcgttgtgcttgtcggccgttgctgtcgtaatgatatcggcaccttcgaccgcctgttccgcagagatcccgtgggcgaagaactccagcatgagatccccgcgctggaggatcatccagccggcgtcccggaaaacgattccgaagcccaacctttcatagaaggcggcggtggaatcgaaatctcgtgatggcaggttgggcgtcgcttggtcggtcatttcgaaccccagagtcccgctcagaagaactcgtcaagaaggcgatagaaggcgatgcgctgcgaatcgggagcggcgataccgtaaagcacgaggaagcggtcagcccattcgccgccaagctcttcagcaatatcacgggtagccaacgctatgtcctgatagcggtccgccacacccagccggccacagtcgatgaatccagaaaagcggccattttccaccatgatattcggcaagcaggcatcgccatgggtcacgacgagatcatcgccgtcgggcatgcgcgccttgagcctggcgaacagttcggctggcgcgagcccctgatgctcttcgtccagatcatcctgatcgacaagaccggcttccatccgagtacgtgctcgctcgatgcgatgtttcgcttggtggtcgaatgggcaggtagccggatcaagcgtatgcagccgccgcattgcatcagccatgatggatactttctcggcaggagcaaggtgagatgacaggagatcctgccccggcacttcgcccaatagcagccagtcccttcccgcttcagtgacaacgtcgagcacagctgcgcaaggaacgcccgtcgtggccagccacgatagccgcgctgcctcgtcctgcagttcattcagggcaccggacaggtcggtcttgacaaaaagaaccgggcgcccctgcgctgacagccggaacacggcggcatcagagcagccgattgtctgttgtgcccagtcatagccgaatagcctctccacccaagcggccggagaacctgcgtgcaatccatcttgttcaatcatgcgaaacgatccagatccggtgcagattatttggattgagagtgaatatgagactctaattggataccgaggggaatttatggaacgtcagtggagcatttttgacaagaaatatttgctagctgatagtgaccttaggcgacttttgaacgcgcaataatggtttctgacgtatgtgcttagctcattaaactccagaaacccgcggctgagtggctccttcaacgttgcggttctgtcagttccaaacgtaaaacggcttgtcccgcgtcatcggcgggggtcataacgtgactcccttaattctccgctcatgatgaattctgcagatatccatcacactggcggccgcggtatcactagtattacagaggtaagttataacagtcgcctaacctctagagggcccaattcgccctatagtgagtcgtattacaattcactggccgtcgttttacaacgtcgtgactgggaaaaccctggcgttacccaacttaatcgccttgcagcacatccccctttcgccagctggcgtaatagcgaagaggcccgcaccgatcgcccttcccaacagttgcgcagcctatacgtacggcagtttaaggtttacacctataaaagagagagccgttatcgtctgtttgtggatgtacagagtgatattattgacacgccggggcgacggatggtgatccccctggccagtgcacgtctgctgtcagataaagtctcccgtgaactttacccggtggtgcatatcggggatgaaagctggcgcatgatgaccaccgatatggccagtgtgccggtctccgttatcggggaagaagtggctgatctcagccaccgcgaaaatgacatcaaaaacgccattaacctgatgttctggggaatataaatgtcaggcatgagattatcaaaaaggatcttcacctagatccttttcacgtagaaagccagtccgcagaaacggtgctgaccccggatgaatgtcagctactgggctatctggacaagggaaaacgcaagcgcaaagagaaagcaggtagcttgcagtgggcttacatggcgatagctagactgggcggttttatggacagcaagcgaaccggaattgccagctggggcgccctctggtaaggttgggaagccctgcaaagtaaactggatggctttctcgccgccaaggatctgatggcgcaggggatcaagctctgatcaagagacaggatgaggatcgtttcgcatgattgaacaagatggattgcacgcaggttctccggccgcttgggtggagaggctattcggctatgactgggcacaacagacaatcggctgctctgatgccgccgtgttccggctgtcagcgcaggggcgcccggttctttttgtcaagaccgacctgtccggtgccctgaatgaactgcaagacgaggcagcgcggctatcgtggctggccacgacgggcgttccttgcgcagctgtgctcgacgttgtcactgaagcgggaagggactggctgctattgggcgaagtgccggggcaggatctcctgtcatctcaccttgctcctgccgagaaagtatccatcatggctgatgcaatgcggcggctgcatacgcttgatccggctacctgcccattcgaccaccaagcgaaacatcgcatcgagcgagcacgtactcggatggaagccggtcttgtcgatcaggatgatctggacgaagagcatcaggggctcgcgccagccgaactgttcgccaggctcaaggcgagcatgcccgacggcgaggatctcgtcgtgacccatggcgatgcctgcttgccgaatatcatggtggaaaatggccgcttttctggattcatcgactgtggccggctgggtgtggcggaccgctatcaggacatagcgttggctacccgtgatattgctgaagagcttggcggcgaatgggctgaccgcttcctcgtgctttacggtatcgccgctcccgattcgcagcgcatcgccttctatcgccttcttgacgagttcttctgaattattaacgcttacaatttcctgatgcggtattttctccttacgcatctgtgcggtatttcacaccgcatacaggtggcacttttcggggaaatgtgcgcggaacccctatttgtttatttttctaaatacattcaaatatgtatccgctcatgagacaataaccctgataaatgcttcaataatagcacgtgaggagggccaccatggccaagttgaccagtgccgttccggtgctcaccgcgcgcgacgtcgccggagcggtcgagttctggaccgaccggctcgggttctcccgggacttcgtggaggacgacttcgccggtgtggtccgggacgacgtgaccctgttcatcagcgcggtccaggaccaggtggtgccggacaacaccctggcctgggtgtgggtgcgcggcctggacgagctgtacgccgagtggtcggaggtcgtgtccacgaacttccgggacgcctccgggccggccatgaccgagatcggcgagcagccgtgggggcgggagttcgccctgcgcgacccggccggcaactgcgtgcacttcgtggccgaggagcaggactgacacgtgctaaaacttcatttttaatttaaaaggatctaggtgaagatcctttttgataatctcatgaccaaaatcccttaacgtgagttttcgttccactgagcgtcagaccccgtagaaaagatcaaaggatcttcttgagatcctttttttctgcgcgtaatctgctgcttgcaaacaaaaaaaccaccgctaccagcggtggtttgtttgccggatcaagagctaccaactctttttccgaaggtaactggcttcagcagagcgcagataccaaatactgtccttctagtgtagccgtagttaggccaccacttcaagaactctgtagcaccgcctacatacctcgctctgctaatcctgttaccagtggctgctgccagtggcgataagtcgtgtcttaccgggttggactcaagacgatagttaccggataaggcgcagcggtcgggctgaacggggggttcgtgcacacagcccagcttggagcgaacgacctacaccgaactgagatacctacagcgtgagctatgagaaagcgccacgcttcccgaagggagaaaggcggacaggtatccggtaagcggcagggtcggaacaggagagcgcacgagggagcttccagggggaaacgcctggtatctttatagtcctgtcgggtttcgccacctctgacttgagcgtcgatttttgtgatgctcgtcaggggggcggagcctatggaaaaacgccagcaacgcggcctttttacggttcctgggcttttgctggccttttgctcacatgttctttcctgcgttatcccctgattctgtggataaccgtattaccgcctttgagtgagctgataccgctcgccgcagccgaacgaccgagcgcagcgagtcagtgagcgaggaagcggaagagcgcccaatacgcaaaccgcctctccccgcgcgttggccgattcattaatgcagctggcacgacaggtttcccgactggaaagcgggcagtgagcgcaacgcaattaatgtgagttagctcactcattaggcaccccaggctttacactttatgcttccggctcgtatgttgtgtggaattgtgagcggataacaatttcacacaggaaacagctatgaccatgattacgccaagctatttaggtgacactatagaatactcaagctatgcatc

SEQ ID NO: 27 - DNA, 5408 bp, Artificial Sequence
  Synthetic DNA vector
aagcttggtctaatacccaatctctcgtcttatccagatgttttatacgccttaattaaggtgcgtttttatgcttgtagtattgtataatgtttttaagatcctagggataacagggtaatgagctcggatccactagtaacggccgccagtgtgctggaattcccgatctagtaacatagatgacaccgcgcgcgataatttatcctagtttgcgcgctatattttgttttctatcgcgtattaaatgtataattgcgggactctaatcataaaaacccatctcataaataacgtcatgcattacatgttaattattacatgcttaacgtaattcaacagaaattatatgataatcatcgcaagaccggcaacaggattcaatcttaagaaactttattgccaaatgtttgaacgatcggggatcatccgggtctgtggcgggaactccacgaaaatatccgaacgcagcaagatatcgcggtgcatctcggtcttgcctgggcagtcgccgccgacgccgttgatgtggacgccgggcccgatcatattgtcgctcaggatcgtggcgttgtgcttgtcggccgttgctgtcgtaatgatatcggcaccttcgaccgcctgttccgcagagatcccgtgggcgaagaactccagcatgagatccccgcgctggaggatcatccagccggcgtcccggaaaacgattccgaagcccaacctttcatagaaggcggcggtggaatcgaaatctcgtgatggcaggttgggcgtcgcttggtcggtcatttcgaaccccagagtcccgctcagaagaactcgtcaagaaggcgatagaaggcgatgcgctgcgaatcgggagcggcgataccgtaaagcacgaggaagcggtcagcccattcgccgccaagctcttcagcaatatcacgggtagccaacgctatgtcctgatagcggtccgccacacccagccggccacagtcgatgaatccagaaaagcggccattttccaccatgatattcggcaagcaggcatcgccatgggtcacgacgagatcatcgccgtcgggcatgcgcgccttgagcctggcgaacagttcggctggcgcgagcccctgatgctcttcgtccagatcatcctgatcgacaagaccggcttccatccgagtacgtgctcgctcgatgcgatgtttcgcttggtggtcgaatgggcaggtagccggatcaagcgtatgcagccgccgcattgcatcagccatgatggatactttctcggcaggagcaaggtgagatgacaggagatcctgccccggcacttcgcccaatagcagccagtcccttcccgcttcagtgacaacgtcgagcacagctgcgcaaggaacgcccgtcgtggccagccacgatagccgcgctgcctcgtcctgcagttcattcagggcaccggacaggtcggtcttgacaaaaagaaccgggcgcccctgcgctgacagccggaacacggcggcatcagagcagccgattgtctgttgtgcccagtcatagccgaatagcctctccacccaagcggccggagaacctgcgtgcaatccatcttgttcaatcatgcgaaacgatccagatccggtgcagattatttggattgagagtgaatatgagactctaattggataccgaggggaatttatggaacgtcagtggagcatttttgacaagaaatatttgctagctgatagtgaccttaggcgacttttgaacgcgcaataatggtttctgacgtatgtgcttagctcattaaactccagaaacccgcggctgagtggctccttcaacgttgcggttctgtcagttccaaacgtaaaacggcttgtcccgcgtcatcggcgggggtcataacgtgactcccttaattctccgctcatgatgaattctgcagatatccatcacactggcggccgcggtatcactagtattacagaggtaagttataacagtcgcctaacctctagagggcccaattcgccctatagtgagtcgtattacaattcactggccgtcgttttacaacgtcgtgactgggaaaaccctggcgttacccaacttaatcgccttgcagcacatccccctttcgccagctggcgtaatagcgaagaggcccgcaccgatcgcccttcccaacagttgcgcagcctatacgtacggcagtttaaggtttacacctataaaagagagagccgttatcgtctgtttgtggatgtacagagtgatattattgacacgccggggcgacggatggtgatccccctggccagtgcacgtctgctgtcagataaagtctcccgtgaactttacccggtggtgcatatcggggatgaaagctggcgcatgatgaccaccgatatggccagtgtgccggtctccgttatcggggaagaagtggctgatctcagccaccgcgaaaatgacatcaaaaacgccattaacctgatgttctggggaatataaatgtcaggcatgagattatcaaaaaggatcttcacctagatccttttcacgtagaaagccagtccgcagaaacggtgctgaccccggatgaatgtcagctactgggctatctggacaagggaaaacgcaagcgcaaagagaaagcaggtagcttgcagtgggcttacatggcgatagctagactgggcggttttatggacagcaagcgaaccggaattgccagctggggcgccctctggtaaggttgggaagccctgcaaagtaaactggatggctttctcgccgccaaggatctgatggcgcaggggatcaagctctgatcaagagacaggatgaggatcgtttcgcatgattgaacaagatggattgcacgcaggttctccggccgcttgggtggagaggctattcggctatgactgggcacaacagacaatcggctgctctgatgccgccgtgttccggctgtcagcgcaggggcgcccggttctttttgtcaagaccgacctgtccggtgccctgaatgaactgcaagacgaggcagcgcggctatcgtggctggccacgacgggcgttccttgcgcagctgtgctcgacgttgtcactgaagcgggaagggactggctgctattgggcgaagtgccggggcaggatctcctgtcatctcaccttgctcctgccgagaaagtatccatcatggctgatgcaatgcggcggctgcatacgcttgatccggctacctgcccattcgaccaccaagcgaaacatcgcatcgagcgagcacgtactcggatggaagccggtcttgtcgatcaggatgatctggacgaagagcatcaggggctcgcgccagccgaactgttcgccaggctcaaggcgagcatgcccgacggcgaggatctcgtcgtgacccatggcgatgcctgcttgccgaatatcatggtggaaaatggccgcttttctggattcatcgactgtggccggctgggtgtggcggaccgctatcaggacatagcgttggctacccgtgatattgctgaagagcttggcggcgaatgggctgaccgcttcctcgtgctttacggtatcgccgctcccgattcgcagcgcatcgccttctatcgccttcttgacgagttcttctgaattattaacgcttacaatttcctgatgcggtattttctccttacgcatctgtgcggtatttcacaccgcatacaggtggcacttttcggggaaatgtgcgcggaacccctatttgtttatttttctaaatacattcaaatatgtatccgctcatgagacaataaccctgataaatgcttcaataatagcacgtgaggagggccaccatggccaagttgaccagtgccgttccggtgctcaccgcgcgcgacgtcgccggagcggtcgagttctggaccgaccggctcgggttctcccgggacttcgtggaggacgacttcgccggtgtggtccgggacgacgtgaccctgttcatcagcgcggtccaggaccaggtggtgccggacaacaccctggcctgggtgtgggtgcgcggcctggacgagctgtacgccgagtggtcggaggtcgtgtccacgaacttccgggacgcctccgggccggccatgaccgagatcggcgagcagccgtgggggcgggagttcgccctgcgcgacccggccggcaactgcgtgcacttcgtggccgaggagcaggactgacacgtgctaaaacttcatttttaatttaaaaggatctaggtgaagatcctttttgataatctcatgaccaaaatcccttaacgtgagttttcgttccactgagcgtcagaccccgtagaaaagatcaaaggatcttcttgagatcctttttttctgcgcgtaatctgctgcttgcaaacaaaaaaaccaccgctaccagcggtggtttgtttgccggatcaagagctaccaactctttttccgaaggtaactggcttcagcagagcgcagataccaaatactgtccttctagtgtagccgtagttaggccaccacttcaagaactctgtagcaccgcctacatacctcgctctgctaatcctgttaccagtggctgctgccagtggcgataagtcgtgtcttaccgggttggactcaagacgatagttaccggataaggcgcagcggtcgggctgaacggggggttcgtgcacacagcccagcttggagcgaacgacctacaccgaactgagatacctacagcgtgagctatgagaaagcgccacgcttcccgaagggagaaaggcggacaggtatccggtaagcggcagggtcggaacaggagagcgcacgagggagcttccagggggaaacgcctggtatctttatagtcctgtcgggtttcgccacctctgacttgagcgtcgatttttgtgatgctcgtcaggggggcggagcctatggaaaaacgccagcaacgcggcctttttacggttcctgggcttttgctggccttttgctcacatgttctttcctgcgttatcccctgattctgtggataaccgtattaccgcctttgagtgagctgataccgctcgccgcagccgaacgaccgagcgcagcgagtcagtgagcgaggaagcggaagagcgcccaatacgcaaaccgcctctccccgcgcgttggccgattcattaatgcagctggcacgacaggtttcccgactggaaagcgggcagtgagcgcaacgcaattaatgtgagttagctcactcattaggcaccccaggctttacactttatgcttccggctcgtatgttgtgtggaattgtgagcggataacaatttcacacaggaaacagctatgaccatgattacgccaagctatttaggtgacactatagaatactcaagctatgcatc

SEQ ID NO: 28 - DNA, 5408 bp, Artificial Sequence
  Synthetic DNA vector
aagcttggtgaattcccttatgtgagtgtaaaaggcaggcgagtttgtcccttaattaaggtgcgtttttatgcttgtagtattgtataatgtttttaagatcctagggataacagggtaatgagctcggatccactagtaacggccgccagtgtgctggaattcccgatctagtaacatagatgacaccgcgcgcgataatttatcctagtttgcgcgctatattttgttttctatcgcgtattaaatgtataattgcgggactctaatcataaaaacccatctcataaataacgtcatgcattacatgttaattattacatgcttaacgtaattcaacagaaattatatgataatcatcgcaagaccggcaacaggattcaatcttaagaaactttattgccaaatgtttgaacgatcggggatcatccgggtctgtggcgggaactccacgaaaatatccgaacgcagcaagatatcgcggtgcatctcggtcttgcctgggcagtcgccgccgacgccgttgatgtggacgccgggcccgatcatattgtcgctcaggatcgtggcgttgtgcttgtcggccgttgctgtcgtaatgatatcggcaccttcgaccgcctgttccgcagagatcccgtgggcgaagaactccagcatgagatccccgcgctggaggatcatccagccggcgtcccggaaaacgattccgaagcccaacctttcatagaaggcggcggtggaatcgaaatctcgtgatggcaggttgggcgtcgcttggtcggtcatttcgaaccccagagtcccgctcagaagaactcgtcaagaaggcgatagaaggcgatgcgctgcgaatcgggagcggcgataccgtaaagcacgaggaagcggtcagcccattcgccgccaagctcttcagcaatatcacgggtagccaacgctatgtcctgatagcggtccgccacacccagccggccacagtcgatgaatccagaaaagcggccattttccaccatgatattcggcaagcaggcatcgccatgggtcacgacgagatcatcgccgtcgggcatgcgcgccttgagcctggcgaacagttcggctggcgcgagcccctgatgctcttcgtccagatcatcctgatcgacaagaccggcttccatccgagtacgtgctcgctcgatgcgatgtttcgcttggtggtcgaatgggcaggtagccggatcaagcgtatgcagccgccgcattgcatcagccatgatggatactttctcggcaggagcaaggtgagatgacaggagatcctgccccggcacttcgcccaatagcagccagtcccttcccgcttcagtgacaacgtcgagcacagctgcgcaaggaacgcccgtcgtggccagccacgatagccgcgctgcctcgtcctgcagttcattcagggcaccggacaggtcggtcttgacaaaaagaaccgggcgcccctgcgctgacagccggaacacggcggcatcagagcagccgattgtctgttgtgcccagtcatagccgaatagcctctccacccaagcggccggagaacctgcgtgcaatccatcttgttcaatcatgcgaaacgatccagatccggtgcagattatttggattgagagtgaatatgagactctaattggataccgaggggaatttatggaacgtcagtggagcatttttgacaagaaatatttgctagctgatagtgaccttaggcgacttttgaacgcgcaataatggtttctgacgtatgtgcttagctcattaaactccagaaacccgcggctgagtggctccttcaacgttgcggttctgtcagttccaaacgtaaaacggcttgtcccgcgtcatcggcgggggtcataacgtgactcccttaattctccgctcatgatgaattctgcagatatccatcacactggcggccgcggtatcactagtattacagaggtaagttataacagtcgcctaacctctagagggcccaattcgccctatagtgagtcgtattacaattcactggccgtcgttttacaacgtcgtgactgggaaaaccctggcgttacccaacttaatcgccttgcagcacatccccctttcgccagctggcgtaatagcgaagaggcccgcaccgatcgcccttcccaacagttgcgcagcctatacgtacggcagtttaaggtttacacctataaaagagagagccgttatcgtctgtttgtggatgtacagagtgatattattgacacgccggggcgacggatggtgatccccctggccagtgcacgtctgctgtcagataaagtctcccgtgaactttacccggtggtgcatatcggggatgaaagctggcgcatgatgaccaccgatatggccagtgtgccggtctccgttatcggggaagaagtggctgatctcagccaccgcgaaaatgacatcaaaaacgccattaacctgatgttctggggaatataaatgtcaggcatgagattatcaaaaaggatcttcacctagatccttttcacgtagaaagccagtccgcagaaacggtgctgaccccggatgaatgtcagctactgggctatctggacaagggaaaacgcaagcgcaaagagaaagcaggtagcttgcagtgggcttacatggcgatagctagactgggcggttttatggacagcaagcgaaccggaattgccagctggggcgccctctggtaaggttgggaagccctgcaaagtaaactggatggctttctcgccgccaaggatctgatggcgcaggggatcaagctctgatcaagagacaggatgaggatcgtttcgcatgattgaacaagatggattgcacgcaggttctccggccgcttgggtggagaggctattcggctatgactgggcacaacagacaatcggctgctctgatgccgccgtgttccggctgtcagcgcaggggcgcccggttctttttgtcaagaccgacctgtccggtgccctgaatgaactgcaagacgaggcagcgcggctatcgtggctggccacgacgggcgttccttgcgcagctgtgctcgacgttgtcactgaagcgggaagggactggctgctattgggcgaagtgccggggcaggatctcctgtcatctcaccttgctcctgccgagaaagtatccatcatggctgatgcaatgcggcggctgcatacgcttgatccggctacctgcccattcgaccaccaagcgaaacatcgcatcgagcgagcacgtactcggatggaagccggtcttgtcgatcaggatgatctggacgaagagcatcaggggctcgcgccagccgaactgttcgccaggctcaaggcgagcatgcccgacggcgaggatctcgtcgtgacccatggcgatgcctgcttgccgaatatcatggtggaaaatggccgcttttctggattcatcgactgtggccggctgggtgtggcggaccgctatcaggacatagcgttggctacccgtgatattgctgaagagcttggcggcgaatgggctgaccgcttcctcgtgctttacggtatcgccgctcccgattcgcagcgcatcgccttctatcgccttcttgacgagttcttctgaattattaacgcttacaatttcctgatgcggtattttctccttacgcatctgtgcggtatttcacaccgcatacaggtggcacttttcggggaaatgtgcgcggaacccctatttgtttatttttctaaatacattcaaatatgtatccgctcatgagacaataaccctgataaatgcttcaataatagcacgtgaggagggccaccatggccaagttgaccagtgccgttccggtgctcaccgcgcgcgacgtcgccggagcggtcgagttctggaccgaccggctcgggttctcccgggacttcgtggaggacgacttcgccggtgtggtccgggacgacgtgaccctgttcatcagcgcggtccaggaccaggtggtgccggacaacaccctggcctgggtgtgggtgcgcggcctggacgagctgtacgccgagtggtcggaggtcgtgtccacgaacttccgggacgcctccgggccggccatgaccgagatcggcgagcagccgtgggggcgggagttcgccctgcgcgacccggccggcaactgcgtgcacttcgtggccgaggagcaggactgacacgtgctaaaacttcatttttaatttaaaaggatctaggtgaagatcctttttgataatctcatgaccaaaatcccttaacgtgagttttcgttccactgagcgtcagaccccgtagaaaagatcaaaggatcttcttgagatcctttttttctgcgcgtaatctgctgcttgcaaacaaaaaaaccaccgctaccagcggtggtttgtttgccggatcaagagctaccaactctttttccgaaggtaactggcttcagcagagcgcagataccaaatactgtccttctagtgtagccgtagttaggccaccacttcaagaactctgtagcaccgcctacatacctcgctctgctaatcctgttaccagtggctgctgccagtggcgataagtcgtgtcttaccgggttggactcaagacgatagttaccggataaggcgcagcggtcgggctgaacggggggttcgtgcacacagcccagcttggagcgaacgacctacaccgaactgagatacctacagcgtgagctatgagaaagcgccacgcttcccgaagggagaaaggcggacaggtatccggtaagcggcagggtcggaacaggagagcgcacgagggagcttccagggggaaacgcctggtatctttatagtcctgtcgggtttcgccacctctgacttgagcgtcgatttttgtgatgctcgtcaggggggcggagcctatggaaaaacgccagcaacgcggcctttttacggttcctgggcttttgctggccttttgctcacatgttctttcctgcgttatcccctgattctgtggataaccgtattaccgcctttgagtgagctgataccgctcgccgcagccgaacgaccgagcgcagcgagtcagtgagcgaggaagcggaagagcgcccaatacgcaaaccgcctctccccgcgcgttggccgattcattaatgcagctggcacgacaggtttcccgactggaaagcgggcagtgagcgcaacgcaattaatgtgagttagctcactcattaggcaccccaggctttacactttatgcttccggctcgtatgttgtgtggaattgtgagcggataacaatttcacacaggaaacagctatgaccatgattacgccaagctatttaggtgacactatagaatactcaagctatgcatc

SEQ ID NO: 29 - DNA, 5408 bp, Artificial Sequence
  Synthetic DNA vector
aagcttggttgcttgcaaaagcagtaattggaaagcactctcaaagaatccttaattaaggtgcgtttttatgcttgtagtattgtataatgtttttaagatcctagggataacagggtaatgagctcggatccactagtaacggccgccagtgtgctggaattcccgatctagtaacatagatgacaccgcgcgcgataatttatcctagtttgcgcgctatattttgttttctatcgcgtattaaatgtataattgcgggactctaatcataaaaacccatctcataaataacgtcatgcattacatgttaattattacatgcttaacgtaattcaacagaaattatatgataatcatcgcaagaccggcaacaggattcaatcttaagaaactttattgccaaatgtttgaacgatcggggatcatccgggtctgtggcgggaactccacgaaaatatccgaacgcagcaagatatcgcggtgcatctcggtcttgcctgggcagtcgccgccgacgccgttgatgtggacgccgggcccgatcatattgtcgctcaggatcgtggcgttgtgcttgtcggccgttgctgtcgtaatgatatcggcaccttcgaccgcctgttccgcagagatcccgtgggcgaagaactccagcatgagatccccgcgctggaggatcatccagccggcgtcccggaaaacgattccgaagcccaacctttcatagaaggcggcggtggaatcgaaatctcgtgatggcaggttgggcgtcgcttggtcggtcatttcgaaccccagagtcccgctcagaagaactcgtcaagaaggcgatagaaggcgatgcgctgcgaatcgggagcggcgataccgtaaagcacgaggaagcggtcagcccattcgccgccaagctcttcagcaatatcacgggtagccaacgctatgtcctgatagcggtccgccacacccagccggccacagtcgatgaatccagaaaagcggccattttccaccatgatattcggcaagcaggcatcgccatgggtcacgacgagatcatcgccgtcgggcatgcgcgccttgagcctggcgaacagttcggctggcgcgagcccctgatgctcttcgtccagatcatcctgatcgacaagaccggcttccatccgagtacgtgctcgctcgatgcgatgtttcgcttggtggtcgaatgggcaggtagccggatcaagcgtatgcagccgccgcattgcatcagccatgatggatactttctcggcaggagcaaggtgagatgacaggagatcctgccccggcacttcgcccaatagcagccagtcccttcccgcttcagtgacaacgtcgagcacagctgcgcaaggaacgcccgtcgtggccagccacgatagccgcgctgcctcgtcctgcagttcattcagggcaccggacaggtcggtcttgacaaaaagaaccgggcgcccctgcgctgacagccggaacacggcggcatcagagcagccgattgtctgttgtgcccagtcatagccgaatagcctctccacccaagcggccggagaacctgcgtgcaatccatcttgttcaatcatgcgaaacgatccagatccggtgcagattatttggattgagagtgaatatgagactctaattggataccgaggggaatttatggaacgtcagtggagcatttttgacaagaaatatttgctagctgatagtgaccttaggcgacttttgaacgcgcaataatggtttctgacgtatgtgcttagctcattaaactccagaaacccgcggctgagtggctccttcaacgttgcggttctgtcagttccaaacgtaaaacggcttgtcccgcgtcatcggcgggggtcataacgtgactcccttaattctccgctcatgatgaattctgcagatatccatcacactggcggccgcggtatcactagtattacagaggtaagttataacagtcgcctaacctctagagggcccaattcgccctatagtgagtcgtattacaattcactggccgtcgttttacaacgtcgtgactgggaaaaccctggcgttacccaacttaatcgccttgcagcacatccccctttcgccagctggcgtaatagcgaagaggcccgcaccgatcgcccttcccaacagttgcgcagcctatacgtacggcagtttaaggtttacacctataaaagagagagccgttatcgtctgtttgtggatgtacagagtgatattattgacacgccggggcgacggatggtgatccccctggccagtgcacgtctgctgtcagataaagtctcccgtgaactttacccggtggtgcatatcggggatgaaagctggcgcatgatgaccaccgatatggccagtgtgccggtctccgttatcggggaagaagtggctgatctcagccaccgcgaaaatgacatcaaaaacgccattaacctgatgttctggggaatataaatgtcaggcatgagattatcaaaaaggatcttcacctagatccttttcacgtagaaagccagtccgcagaaacggtgctgaccccggatgaatgtcagctactgggctatctggacaagggaaaacgcaagcgcaaagagaaagcaggtagcttgcagtgggcttacatggcgatagctagactgggcggttttatggacagcaagcgaaccggaattgccagctggggcgccctctggtaaggttgggaagccctgcaaagtaaactggatggctttctcgccgccaaggatctgatggcgcaggggatcaagctctgatcaagagacaggatgaggatcgtttcgcatgattgaacaagatggattgcacgcaggttctccggccgcttgggtggagaggctattcggctatgactgggcacaacagacaatcggctgctctgatgccgccgtgttccggctgtcagcgcaggggcgcccggttctttttgtcaagaccgacctgtccggtgccctgaatgaactgcaagacgaggcagcgcggctatcgtggctggccacgacgggcgttccttgcgcagctgtgctcgacgttgtcactgaagcgggaagggactggctgctattgggcgaagtgccggggcaggatctcctgtcatctcaccttgctcctgccgagaaagtatccatcatggctgatgcaatgcggcggctgcatacgcttgatccggctacctgcccattcgaccaccaagcgaaacatcgcatcgagcgagcacgtactcggatggaagccggtcttgtcgatcaggatgatctggacgaagagcatcaggggctcgcgccagccgaactgttcgccaggctcaaggcgagcatgcccgacggcgaggatctcgtcgtgacccatggcgatgcctgcttgccgaatatcatggtggaaaatggccgcttttctggattcatcgactgtggccggctgggtgtggcggaccgctatcaggacatagcgttggctacccgtgatattgctgaagagcttggcggcgaatgggctgaccgcttcctcgtgctttacggtatcgccgctcccgattcgcagcgcatcgccttctatcgccttcttgacgagttcttctgaattattaacgcttacaatttcctgatgcggtattttctccttacgcatctgtgcggtatttcacaccgcatacaggtggcacttttcggggaaatgtgcgcggaacccctatttgtttatttttctaaatacattcaaatatgtatccgctcatgagacaataaccctgataaatgcttcaataatagcacgtgaggagggccaccatggccaagttgaccagtgccgttccggtgctcaccgcgcgcgacgtcgccggagcggtcgagttctggaccgaccggctcgggttctcccgggacttcgtggaggacgacttcgccggtgtggtccgggacgacgtgaccctgttcatcagcgcggtccaggaccaggtggtgccggacaacaccctggcctgggtgtgggtgcgcggcctggacgagctgtacgccgagtggtcggaggtcgtgtccacgaacttccgggacgcctccgggccggccatgaccgagatcggcgagcagccgtgggggcgggagttcgccctgcgcgacccggccggcaactgcgtgcacttcgtggccgaggagcaggactgacacgtgctaaaacttcatttttaatttaaaaggatctaggtgaagatcctttttgataatctcatgaccaaaatcccttaacgtgagttttcgttccactgagcgtcagaccccgtagaaaagatcaaaggatcttcttgagatcctttttttctgcgcgtaatctgctgcttgcaaacaaaaaaaccaccgctaccagcggtggtttgtttgccggatcaagagctaccaactctttttccgaaggtaactggcttcagcagagcgcagataccaaatactgtccttctagtgtagccgtagttaggccaccacttcaagaactctgtagcaccgcctacatacctcgctctgctaatcctgttaccagtggctgctgccagtggcgataagtcgtgtcttaccgggttggactcaagacgatagttaccggataaggcgcagcggtcgggctgaacggggggttcgtgcacacagcccagcttggagcgaacgacctacaccgaactgagatacctacagcgtgagctatgagaaagcgccacgcttcccgaagggagaaaggcggacaggtatccggtaagcggcagggtcggaacaggagagcgcacgagggagcttccagggggaaacgcctggtatctttatagtcctgtcgggtttcgccacctctgacttgagcgtcgatttttgtgatgctcgtcaggggggcggagcctatggaaaaacgccagcaacgcggcctttttacggttcctgggcttttgctggccttttgctcacatgttctttcctgcgttatcccctgattctgtggataaccgtattaccgcctttgagtgagctgataccgctcgccgcagccgaacgaccgagcgcagcgagtcagtgagcgaggaagcggaagagcgcccaatacgcaaaccgcctctccccgcgcgttggccgattcattaatgcagctggcacgacaggtttcccgactggaaagcgggcagtgagcgcaacgcaattaatgtgagttagctcactcattaggcaccccaggctttacactttatgcttccggctcgtatgttgtgtggaattgtgagcggataacaatttcacacaggaaacagctatgaccatgattacgccaagctatttaggtgacactatagaatactcaagctatgcatc

SEQ ID NO: 30 - DNA, 5408 bp, Artificial Sequence
  Synthetic DNA vector
aagcttggtagataagttgatttagccataaaatattgtttccgtgaccccttaattaaggtgcgtttttatgcttgtagtattgtataatgtttttaagatcctagggataacagggtaatgagctcggatccactagtaacggccgccagtgtgctggaattcccgatctagtaacatagatgacaccgcgcgcgataatttatcctagtttgcgcgctatattttgttttctatcgcgtattaaatgtataattgcgggactctaatcataaaaacccatctcataaataacgtcatgcattacatgttaattattacatgcttaacgtaattcaacagaaattatatgataatcatcgcaagaccggcaacaggattcaatcttaagaaactttattgccaaatgtttgaacgatcggggatcatccgggtctgtggcgggaactccacgaaaatatccgaacgcagcaagatatcgcggtgcatctcggtcttgcctgggcagtcgccgccgacgccgttgatgtggacgccgggcccgatcatattgtcgctcaggatcgtggcgttgtgcttgtcggccgttgctgtcgtaatgatatcggcaccttcgaccgcctgttccgcagagatcccgtgggcgaagaactccagcatgagatccccgcgctggaggatcatccagccggcgtcccggaaaacgattccgaagcccaacctttcatagaaggcggcggtggaatcgaaatctcgtgatggcaggttgggcgtcgcttggtcggtcatttcgaaccccagagtcccgctcagaagaactcgtcaagaaggcgatagaaggcgatgcgctgcgaatcgggagcggcgataccgtaaagcacgaggaagcggtcagcccattcgccgccaagctcttcagcaatatcacgggtagccaacgctatgtcctgatagcggtccgccacacccagccggccacagtcgatgaatccagaaaagcggccattttccaccatgatattcggcaagcaggcatcgccatgggtcacgacgagatcatcgccgtcgggcatgcgcgccttgagcctggcgaacagttcggctggcgcgagcccctgatgctcttcgtccagatcatcctgatcgacaagaccggcttccatccgagtacgtgctcgctcgatgcgatgtttcgcttggtggtcgaatgggcaggtagccggatcaagcgtatgcagccgccgcattgcatcagccatgatggatactttctcggcaggagcaaggtgagatgacaggagatcctgccccggcacttcgcccaatagcagccagtcccttcccgcttcagtgacaacgtcgagcacagctgcgcaaggaacgcccgtcgtggccagccacgatagccgcgctgcctcgtcctgcagttcattcagggcaccggacaggtcggtcttgacaaaaagaaccgggcgcccctgcgctgacagccggaacacggcggcatcagagcagccgattgtctgttgtgcccagtcatagccgaatagcctctccacccaagcggccggagaacctgcgtgcaatccatcttgttcaatcatgcgaaacgatccagatccggtgcagattatttggattgagagtgaatatgagactctaattggataccgaggggaatttatggaacgtcagtggagcatttttgacaagaaatatttgctagctgatagtgaccttaggcgacttttgaacgcgcaataatggtttctgacgtatgtgcttagctcattaaactccagaaacccgcggctgagtggctccttcaacgttgcggttctgtcagttccaaacgtaaaacggcttgtcccgcgtcatcggcgggggtcataacgtgactcccttaattctccgctcatgatgaattctgcagatatccatcacactggcggccgcggtatcactagtattacagaggtaagttataacagtcgcctaacctctagagggcccaattcgccctatagtgagtcgtattacaattcactggccgtcgttttacaacgtcgtgactgggaaaaccctggcgttacccaacttaatcgccttgcagcacatccccctttcgccagctggcgtaatagcgaagaggcccgcaccgatcgcccttcccaacagttgcgcagcctatacgtacggcagtttaaggtttacacctataaaagagagagccgttatcgtctgtttgtggatgtacagagtgatattattgacacgccggggcgacggatggtgatccccctggccagtgcacgtctgctgtcagataaagtctcccgtgaactttacccggtggtgcatatcggggatgaaagctggcgcatgatgaccaccgatatggccagtgtgccggtctccgttatcggggaagaagtggctgatctcagccaccgcgaaaatgacatcaaaaacgccattaacctgatgttctggggaatataaatgtcaggcatgagattatcaaaaaggatcttcacctagatccttttcacgtagaaagccagtccgcagaaacggtgctgaccccggatgaatgtcagctactgggctatctggacaagggaaaacgcaagcgcaaagagaaagcaggtagcttgcagtgggcttacatggcgatagctagactgggcggttttatggacagcaagcgaaccggaattgccagctggggcgccctctggtaaggttgggaagccctgcaaagtaaactggatggctttctcgccgccaaggatctgatggcgcaggggatcaagctctgatcaagagacaggatgaggatcgtttcgcatgattgaacaagatggattgcacgcaggttctccggccgcttgggtggagaggctattcggctatgactgggcacaacagacaatcggctgctctgatgccgccgtgttccggctgtcagcgcaggggcgcccggttctttttgtcaagaccgacctgtccggtgccctgaatgaactgcaagacgaggcagcgcggctatcgtggctggccacgacgggcgttccttgcgcagctgtgctcgacgttgtcactgaagcgggaagggactggctgctattgggcgaagtgccggggcaggatctcctgtcatctcaccttgctcctgccgagaaagtatccatcatggctgatgcaatgcggcggctgcatacgcttgatccggctacctgcccattcgaccaccaagcgaaacatcgcatcgagcgagcacgtactcggatggaagccggtcttgtcgatcaggatgatctggacgaagagcatcaggggctcgcgccagccgaactgttcgccaggctcaaggcgagcatgcccgacggcgaggatctcgtcgtgacccatggcgatgcctgcttgccgaatatcatggtggaaaatggccgcttttctggattcatcgactgtggccggctgggtgtggcggaccgctatcaggacatagcgttggctacccgtgatattgctgaagagcttggcggcgaatgggctgaccgcttcctcgtgctttacggtatcgccgctcccgattcgcagcgcatcgccttctatcgccttcttgacgagttcttctgaattattaacgcttacaatttcctgatgcggtattttctccttacgcatctgtgcggtatttcacaccgcatacaggtggcacttttcggggaaatgtgcgcggaacccctatttgtttatttttctaaatacattcaaatatgtatccgctcatgagacaataaccctgataaatgcttcaataatagcacgtgaggagggccaccatggccaagttgaccagtgccgttccggtgctcaccgcgcgcgacgtcgccggagcggtcgagttctggaccgaccggctcgggttctcccgggacttcgtggaggacgacttcgccggtgtggtccgggacgacgtgaccctgttcatcagcgcggtccaggaccaggtggtgccggacaacaccctggcctgggtgtgggtgcgcggcctggacgagctgtacgccgagtggtcggaggtcgtgtccacgaacttccgggacgcctccgggccggccatgaccgagatcggcgagcagccgtgggggcgggagttcgccctgcgcgacccggccggcaactgcgtgcacttcgtggccgaggagcaggactgacacgtgctaaaacttcatttttaatttaaaaggatctaggtgaagatcctttttgataatctcatgaccaaaatcccttaacgtgagttttcgttccactgagcgtcagaccccgtagaaaagatcaaaggatcttcttgagatcctttttttctgcgcgtaatctgctgcttgcaaacaaaaaaaccaccgctaccagcggtggtttgtttgccggatcaagagctaccaactctttttccgaaggtaactggcttcagcagagcgcagataccaaatactgtccttctagtgtagccgtagttaggccaccacttcaagaactctgtagcaccgcctacatacctcgctctgctaatcctgttaccagtggctgctgccagtggcgataagtcgtgtcttaccgggttggactcaagacgatagttaccggataaggcgcagcggtcgggctgaacggggggttcgtgcacacagcccagcttggagcgaacgacctacaccgaactgagatacctacagcgtgagctatgagaaagcgccacgcttcccgaagggagaaaggcggacaggtatccggtaagcggcagggtcggaacaggagagcgcacgagggagcttccagggggaaacgcctggtatctttatagtcctgtcgggtttcgccacctctgacttgagcgtcgatttttgtgatgctcgtcaggggggcggagcctatggaaaaacgccagcaacgcggcctttttacggttcctgggcttttgctggccttttgctcacatgttctttcctgcgttatcccctgattctgtggataaccgtattaccgcctttgagtgagctgataccgctcgccgcagccgaacgaccgagcgcagcgagtcagtgagcgaggaagcggaagagcgcccaatacgcaaaccgcctctccccgcgcgttggccgattcattaatgcagctggcacgacaggtttcccgactggaaagcgggcagtgagcgcaacgcaattaatgtgagttagctcactcattaggcaccccaggctttacactttatgcttccggctcgtatgttgtgtggaattgtgagcggataacaatttcacacaggaaacagctatgaccatgattacgccaagctatttaggtgacactatagaatactcaagctatgcatc

SEQ ID NO: 31 - DNA, 5408 bp, Artificial Sequence
  Synthetic DNA vector
aagcttggttctgagtcacggcttcattggcattccgtacaacgaacgtccttaattaaggtgcgtttttatgcttgtagtattgtataatgtttttaagatcctagggataacagggtaatgagctcggatccactagtaacggccgccagtgtgctggaattcccgatctagtaacatagatgacaccgcgcgcgataatttatcctagtttgcgcgctatattttgttttctatcgcgtattaaatgtataattgcgggactctaatcataaaaacccatctcataaataacgtcatgcattacatgttaattattacatgcttaacgtaattcaacagaaattatatgataatcatcgcaagaccggcaacaggattcaatcttaagaaactttattgccaaatgtttgaacgatcggggatcatccgggtctgtggcgggaactccacgaaaatatccgaacgcagcaagatatcgcggtgcatctcggtcttgcctgggcagtcgccgccgacgccgttgatgtggacgccgggcccgatcatattgtcgctcaggatcgtggcgttgtgcttgtcggccgttgctgtcgtaatgatatcggcaccttcgaccgcctgttccgcagagatcccgtgggcgaagaactccagcatgagatccccgcgctggaggatcatccagccggcgtcccggaaaacgattccgaagcccaacctttcatagaaggcggcggtggaatcgaaatctcgtgatggcaggttgggcgtcgcttggtcggtcatttcgaaccccagagtcccgctcagaagaactcgtcaagaaggcgatagaaggcgatgcgctgcgaatcgggagcggcgataccgtaaagcacgaggaagcggtcagcccattcgccgccaagctcttcagcaatatcacgggtagccaacgctatgtcctgatagcggtccgccacacccagccggccacagtcgatgaatccagaaaagcggccattttccaccatgatattcggcaagcaggcatcgccatgggtcacgacgagatcatcgccgtcgggcatgcgcgccttgagcctggcgaacagttcggctggcgcgagcccctgatgctcttcgtccagatcatcctgatcgacaagaccggcttccatccgagtacgtgctcgctcgatgcgatgtttcgcttggtggtcgaatgggcaggtagccggatcaagcgtatgcagccgccgcattgcatcagccatgatggatactttctcggcaggagcaaggtgagatgacaggagatcctgccccggcacttcgcccaatagcagccagtcccttcccgcttcagtgacaacgtcgagcacagctgcgcaaggaacgcccgtcgtggccagccacgatagccgcgctgcctcgtcctgcagttcattcagggcaccggacaggtcggtcttgacaaaaagaaccgggcgcccctgcgctgacagccggaacacggcggcatcagagcagccgattgtctgttgtgcccagtcatagccgaatagcctctccacccaagcggccggagaacctgcgtgcaatccatcttgttcaatcatgcgaaacgatccagatccggtgcagattatttggattgagagtgaatatgagactctaattggataccgaggggaatttatggaacgtcagtggagcatttttgacaagaaatatttgctagctgatagtgaccttaggcgacttttgaacgcgcaataatggtttctgacgtatgtgcttagctcattaaactccagaaacccgcggctgagtggctccttcaacgttgcggttctgtcagttccaaacgtaaaacggcttgtcccgcgtcatcggcgggggtcataacgtgactcccttaattctccgctcatgatgaattctgcagatatccatcacactggcggccgcggtatcactagtattacagaggtaagttataacagtcgcctaacctctagagggcccaattcgccctatagtgagtcgtattacaattcactggccgtcgttttacaacgtcgtgactgggaaaaccctggcgttacccaacttaatcgccttgcagcacatccccctttcgccagctggcgtaatagcgaagaggcccgcaccgatcgcccttcccaacagttgcgcagcctatacgtacggcagtttaaggtttacacctataaaagagagagccgttatcgtctgtttgtggatgtacagagtgatattattgacacgccggggcgacggatggtgatccccctggccagtgcacgtctgctgtcagataaagtctcccgtgaactttacccggtggtgcatatcggggatgaaagctggcgcatgatgaccaccgatatggccagtgtgccggtctccgttatcggggaagaagtggctgatctcagccaccgcgaaaatgacatcaaaaacgccattaacctgatgttctggggaatataaatgtcaggcatgagattatcaaaaaggatcttcacctagatccttttcacgtagaaagccagtccgcagaaacggtgctgaccccggatgaatgtcagctactgggctatctggacaagggaaaacgcaagcgcaaagagaaagcaggtagcttgcagtgggcttacatggcgatagctagactgggcggttttatggacagcaagcgaaccggaattgccagctggggcgccctctggtaaggttgggaagccctgcaaagtaaactggatggctttctcgccgccaaggatctgatggcgcaggggatcaagctctgatcaagagacaggatgaggatcgtttcgcatgattgaacaagatggattgcacgcaggttctccggccgcttgggtggagaggctattcggctatgactgggcacaacagacaatcggctgctctgatgccgccgtgttccggctgtcagcgcaggggcgcccggttctttttgtcaagaccgacctgtccggtgccctgaatgaactgcaagacgaggcagcgcggctatcgtggctggccacgacgggcgttccttgcgcagctgtgctcgacgttgtcactgaagcgggaagggactggctgctattgggcgaagtgccggggcaggatctcctgtcatctcaccttgctcctgccgagaaagtatccatcatggctgatgcaatgcggcggctgcatacgcttgatccggctacctgcccattcgaccaccaagcgaaacatcgcatcgagcgagcacgtactcggatggaagccggtcttgtcgatcaggatgatctggacgaagagcatcaggggctcgcgccagccgaactgttcgccaggctcaaggcgagcatgcccgacggcgaggatctcgtcgtgacccatggcgatgcctgcttgccgaatatcatggtggaaaatggccgcttttctggattcatcgactgtggccggctgggtgtggcggaccgctatcaggacatagcgttggctacccgtgatattgctgaagagcttggcggcgaatgggctgaccgcttcctcgtgctttacggtatcgccgctcccgattcgcagcgcatcgccttctatcgccttcttgacgagttcttctgaattattaacgcttacaatttcctgatgcggtattttctccttacgcatctgtgcggtatttcacaccgcatacaggtggcacttttcggggaaatgtgcgcggaacccctatttgtttatttttctaaatacattcaaatatgtatccgctcatgagacaataaccctgataaatgcttcaataatagcacgtgaggagggccaccatggccaagttgaccagtgccgttccggtgctcaccgcgcgcgacgtcgccggagcggtcgagttctggaccgaccggctcgggttctcccgggacttcgtggaggacgacttcgccggtgtggtccgggacgacgtgaccctgttcatcagcgcggtccaggaccaggtggtgccggacaacaccctggcctgggtgtgggtgcgcggcctggacgagctgtacgccgagtggtcggaggtcgtgtccacgaacttccgggacgcctccgggccggccatgaccgagatcggcgagcagccgtgggggcgggagttcgccctgcgcgacccggccggcaactgcgtgcacttcgtggccgaggagcaggactgacacgtgctaaaacttcatttttaatttaaaaggatctaggtgaagatcctttttgataatctcatgaccaaaatcccttaacgtgagttttcgttccactgagcgtcagaccccgtagaaaagatcaaaggatcttcttgagatcctttttttctgcgcgtaatctgctgcttgcaaacaaaaaaaccaccgctaccagcggtggtttgtttgccggatcaagagctaccaactctttttccgaaggtaactggcttcagcagagcgcagataccaaatactgtccttctagtgtagccgtagttaggccaccacttcaagaactctgtagcaccgcctacatacctcgctctgctaatcctgttaccagtggctgctgccagtggcgataagtcgtgtcttaccgggttggactcaagacgatagttaccggataaggcgcagcggtcgggctgaacggggggttcgtgcacacagcccagcttggagcgaacgacctacaccgaactgagatacctacagcgtgagctatgagaaagcgccacgcttcccgaagggagaaaggcggacaggtatccggtaagcggcagggtcggaacaggagagcgcacgagggagcttccagggggaaacgcctggtatctttatagtcctgtcgggtttcgccacctctgacttgagcgtcgatttttgtgatgctcgtcaggggggcggagcctatggaaaaacgccagcaacgcggcctttttacggttcctgggcttttgctggccttttgctcacatgttctttcctgcgttatcccctgattctgtggataaccgtattaccgcctttgagtgagctgataccgctcgccgcagccgaacgaccgagcgcagcgagtcagtgagcgaggaagcggaagagcgcccaatacgcaaaccgcctctccccgcgcgttggccgattcattaatgcagctggcacgacaggtttcccgactggaaagcgggcagtgagcgcaacgcaattaatgtgagttagctcactcattaggcaccccaggctttacactttatgcttccggctcgtatgttgtgtggaattgtgagcggataacaatttcacacaggaaacagctatgaccatgattacgccaagctatttaggtgacactatagaatactcaagctatgcatc

SEQ ID NO: 32 - DNA, 5408 bp, Artificial Sequence
  Synthetic DNA vector
aagcttggtcctcagagagcctatagcggtaaaacaacaccatgcatccccttaattaaggtgcgtttttatgcttgtagtattgtataatgtttttaagatcctagggataacagggtaatgagctcggatccactagtaacggccgccagtgtgctggaattcccgatctagtaacatagatgacaccgcgcgcgataatttatcctagtttgcgcgctatattttgttttctatcgcgtattaaatgtataattgcgggactctaatcataaaaacccatctcataaataacgtcatgcattacatgttaattattacatgcttaacgtaattcaacagaaattatatgataatcatcgcaagaccggcaacaggattcaatcttaagaaactttattgccaaatgtttgaacgatcggggatcatccgggtctgtggcgggaactccacgaaaatatccgaacgcagcaagatatcgcggtgcatctcggtcttgcctgggcagtcgccgccgacgccgttgatgtggacgccgggcccgatcatattgtcgctcaggatcgtggcgttgtgcttgtcggccgttgctgtcgtaatgatatcggcaccttcgaccgcctgttccgcagagatcccgtgggcgaagaactccagcatgagatccccgcgctggaggatcatccagccggcgtcccggaaaacgattccgaagcccaacctttcatagaaggcggcggtggaatcgaaatctcgtgatggcaggttgggcgtcgcttggtcggtcatttcgaaccccagagtcccgctcagaagaactcgtcaagaaggcgatagaaggcgatgcgctgcgaatcgggagcggcgataccgtaaagcacgaggaagcggtcagcccattcgccgccaagctcttcagcaatatcacgggtagccaacgctatgtcctgatagcggtccgccacacccagccggccacagtcgatgaatccagaaaagcggccattttccaccatgatattcggcaagcaggcatcgccatgggtcacgacgagatcatcgccgtcgggcatgcgcgccttgagcctggcgaacagttcggctggcgcgagcccctgatgctcttcgtccagatcatcctgatcgacaagaccggcttccatccgagtacgtgctcgctcgatgcgatgtttcgcttggtggtcgaatgggcaggtagccggatcaagcgtatgcagccgccgcattgcatcagccatgatggatactttctcggcaggagcaaggtgagatgacaggagatcctgccccggcacttcgcccaatagcagccagtcccttcccgcttcagtgacaacgtcgagcacagctgcgcaaggaacgcccgtcgtggccagccacgatagccgcgctgcctcgtcctgcagttcattcagggcaccggacaggtcggtcttgacaaaaagaaccgggcgcccctgcgctgacagccggaacacggcggcatcagagcagccgattgtctgttgtgcccagtcatagccgaatagcctctccacccaagcggccggagaacctgcgtgcaatccatcttgttcaatcatgcgaaacgatccagatccggtgcagattatttggattgagagtgaatatgagactctaattggataccgaggggaatttatggaacgtcagtggagcatttttgacaagaaatatttgctagctgatagtgaccttaggcgacttttgaacgcgcaataatggtttctgacgtatgtgcttagctcattaaactccagaaacccgcggctgagtggctccttcaacgttgcggttctgtcagttccaaacgtaaaacggcttgtcccgcgtcatcggcgggggtcataacgtgactcccttaattctccgctcatgatgaattctgcagatatccatcacactggcggccgcggtatcactagtattacagaggtaagttataacagtcgcctaacctctagagggcccaattcgccctatagtgagtcgtattacaattcactggccgtcgttttacaacgtcgtgactgggaaaaccctggcgttacccaacttaatcgccttgcagcacatccccctttcgccagctggcgtaatagcgaagaggcccgcaccgatcgcccttcccaacagttgcgcagcctatacgtacggcagtttaaggtttacacctataaaagagagagccgttatcgtctgtttgtggatgtacagagtgatattattgacacgccggggcgacggatggtgatccccctggccagtgcacgtctgctgtcagataaagtctcccgtgaactttacccggtggtgcatatcggggatgaaagctggcgcatgatgaccaccgatatggccagtgtgccggtctccgttatcggggaagaagtggctgatctcagccaccgcgaaaatgacatcaaaaacgccattaacctgatgttctggggaatataaatgtcaggcatgagattatcaaaaaggatcttcacctagatccttttcacgtagaaagccagtccgcagaaacggtgctgaccccggatgaatgtcagctactgggctatctggacaagggaaaacgcaagcgcaaagagaaagcaggtagcttgcagtgggcttacatggcgatagctagactgggcggttttatggacagcaagcgaaccggaattgccagctggggcgccctctggtaaggttgggaagccctgcaaagtaaactggatggctttctcgccgccaaggatctgatggcgcaggggatcaagctctgatcaagagacaggatgaggatcgtttcgcatgattgaacaagatggattgcacgcaggttctccggccgcttgggtggagaggctattcggctatgactgggcacaacagacaatcggctgctctgatgccgccgtgttccggctgtcagcgcaggggcgcccggttctttttgtcaagaccgacctgtccggtgccctgaatgaactgcaagacgaggcagcgcggctatcgtggctggccacgacgggcgttccttgcgcagctgtgctcgacgttgtcactgaagcgggaagggactggctgctattgggcgaagtgccggggcaggatctcctgtcatctcaccttgctcctgccgagaaagtatccatcatggctgatgcaatgcggcggctgcatacgcttgatccggctacctgcccattcgaccaccaagcgaaacatcgcatcgagcgagcacgtactcggatggaagccggtcttgtcgatcaggatgatctggacgaagagcatcaggggctcgcgccagccgaactgttcgccaggctcaaggcgagcatgcccgacggcgaggatctcgtcgtgacccatggcgatgcctgcttgccgaatatcatggtggaaaatggccgcttttctggattcatcgactgtggccggctgggtgtggcggaccgctatcaggacatagcgttggctacccgtgatattgctgaagagcttggcggcgaatgggctgaccgcttcctcgtgctttacggtatcgccgctcccgattcgcagcgcatcgccttctatcgccttcttgacgagttcttctgaattattaacgcttacaatttcctgatgcggtattttctccttacgcatctgtgcggtatttcacaccgcatacaggtggcacttttcggggaaatgtgcgcggaacccctatttgtttatttttctaaatacattcaaatatgtatccgctcatgagacaataaccctgataaatgcttcaataatagcacgtgaggagggccaccatggccaagttgaccagtgccgttccggtgctcaccgcgcgcgacgtcgccggagcggtcgagttctggaccgaccggctcgggttctcccgggacttcgtggaggacgacttcgccggtgtggtccgggacgacgtgaccctgttcatcagcgcggtccaggaccaggtggtgccggacaacaccctggcctgggtgtgggtgcgcggcctggacgagctgtacgccgagtggtcggaggtcgtgtccacgaacttccgggacgcctccgggccggccatgaccgagatcggcgagcagccgtgggggcgggagttcgccctgcgcgacccggccggcaactgcgtgcacttcgtggccgaggagcaggactgacacgtgctaaaacttcatttttaatttaaaaggatctaggtgaagatcctttttgataatctcatgaccaaaatcccttaacgtgagttttcgttccactgagcgtcagaccccgtagaaaagatcaaaggatcttcttgagatcctttttttctgcgcgtaatctgctgcttgcaaacaaaaaaaccaccgctaccagcggtggtttgtttgccggatcaagagctaccaactctttttccgaaggtaactggcttcagcagagcgcagataccaaatactgtccttctagtgtagccgtagttaggccaccacttcaagaactctgtagcaccgcctacatacctcgctctgctaatcctgttaccagtggctgctgccagtggcgataagtcgtgtcttaccgggttggactcaagacgatagttaccggataaggcgcagcggtcgggctgaacggggggttcgtgcacacagcccagcttggagcgaacgacctacaccgaactgagatacctacagcgtgagctatgagaaagcgccacgcttcccgaagggagaaaggcggacaggtatccggtaagcggcagggtcggaacaggagagcgcacgagggagcttccagggggaaacgcctggtatctttatagtcctgtcgggtttcgccacctctgacttgagcgtcgatttttgtgatgctcgtcaggggggcggagcctatggaaaaacgccagcaacgcggcctttttacggttcctgggcttttgctggccttttgctcacatgttctttcctgcgttatcccctgattctgtggataaccgtattaccgcctttgagtgagctgataccgctcgccgcagccgaacgaccgagcgcagcgagtcagtgagcgaggaagcggaagagcgcccaatacgcaaaccgcctctccccgcgcgttggccgattcattaatgcagctggcacgacaggtttcccgactggaaagcgggcagtgagcgcaacgcaattaatgtgagttagctcactcattaggcaccccaggctttacactttatgcttccggctcgtatgttgtgtggaattgtgagcggataacaatttcacacaggaaacagctatgaccatgattacgccaagctatttaggtgacactatagaatactcaagctatgcatc

SEQ ID NO: 33 - DNA, 5408 bp, Artificial Sequence
  Synthetic DNA vector
aagcttggtcgcagtcgcttcctgtaaatagagcattaaattccatagtccttaattaaggtgcgtttttatgcttgtagtattgtataatgtttttaagatcctagggataacagggtaatgagctcggatccactagtaacggccgccagtgtgctggaattcccgatctagtaacatagatgacaccgcgcgcgataatttatcctagtttgcgcgctatattttgttttctatcgcgtattaaatgtataattgcgggactctaatcataaaaacccatctcataaataacgtcatgcattacatgttaattattacatgcttaacgtaattcaacagaaattatatgataatcatcgcaagaccggcaacaggattcaatcttaagaaactttattgccaaatgtttgaacgatcggggatcatccgggtctgtggcgggaactccacgaaaatatccgaacgcagcaagatatcgcggtgcatctcggtcttgcctgggcagtcgccgccgacgccgttgatgtggacgccgggcccgatcatattgtcgctcaggatcgtggcgttgtgcttgtcggccgttgctgtcgtaatgatatcggcaccttcgaccgcctgttccgcagagatcccgtgggcgaagaactccagcatgagatccccgcgctggaggatcatccagccggcgtcccggaaaacgattccgaagcccaacctttcatagaaggcggcggtggaatcgaaatctcgtgatggcaggttgggcgtcgcttggtcggtcatttcgaaccccagagtcccgctcagaagaactcgtcaagaaggcgatagaaggcgatgcgctgcgaatcgggagcggcgataccgtaaagcacgaggaagcggtcagcccattcgccgccaagctcttcagcaatatcacgggtagccaacgctatgtcctgatagcggtccgccacacccagccggccacagtcgatgaatccagaaaagcggccattttccaccatgatattcggcaagcaggcatcgccatgggtcacgacgagatcatcgccgtcgggcatgcgcgccttgagcctggcgaacagttcggctggcgcgagcccctgatgctcttcgtccagatcatcctgatcgacaagaccggcttccatccgagtacgtgctcgctcgatgcgatgtttcgcttggtggtcgaatgggcaggtagccggatcaagcgtatgcagccgccgcattgcatcagccatgatggatactttctcggcaggagcaaggtgagatgacaggagatcctgccccggcacttcgcccaatagcagccagtcccttcccgcttcagtgacaacgtcgagcacagctgcgcaaggaacgcccgtcgtggccagccacgatagccgcgctgcctcgtcctgcagttcattcagggcaccggacaggtcggtcttgacaaaaagaaccgggcgcccctgcgctgacagccggaacacggcggcatcagagcagccgattgtctgttgtgcccagtcatagccgaatagcctctccacccaagcggccggagaacctgcgtgcaatccatcttgttcaatcatgcgaaacgatccagatccggtgcagattatttggattgagagtgaatatgagactctaattggataccgaggggaatttatggaacgtcagtggagcatttttgacaagaaatatttgctagctgatagtgaccttaggcgacttttgaacgcgcaataatggtttctgacgtatgtgcttagctcattaaactccagaaacccgcggctgagtggctccttcaacgttgcggttctgtcagttccaaacgtaaaacggcttgtcccgcgtcatcggcgggggtcataacgtgactcccttaattctccgctcatgatgaattctgcagatatccatcacactggcggccgcggtatcactagtattacagaggtaagttataacagtcgcctaacctctagagggcccaattcgccctatagtgagtcgtattacaattcactggccgtcgttttacaacgtcgtgactgggaaaaccctggcgttacccaacttaatcgccttgcagcacatccccctttcgccagctggcgtaatagcgaagaggcccgcaccgatcgcccttcccaacagttgcgcagcctatacgtacggcagtttaaggtttacacctataaaagagagagccgttatcgtctgtttgtggatgtacagagtgatattattgacacgccggggcgacggatggtgatccccctggccagtgcacgtctgctgtcagataaagtctcccgtgaactttacccggtggtgcatatcggggatgaaagctggcgcatgatgaccaccgatatggccagtgtgccggtctccgttatcggggaagaagtggctgatctcagccaccgcgaaaatgacatcaaaaacgccattaacctgatgttctggggaatataaatgtcaggcatgagattatcaaaaaggatcttcacctagatccttttcacgtagaaagccagtccgcagaaacggtgctgaccccggatgaatgtcagctactgggctatctggacaagggaaaacgcaagcgcaaagagaaagcaggtagcttgcagtgggcttacatggcgatagctagactgggcggttttatggacagcaagcgaaccggaattgccagctggggcgccctctggtaaggttgggaagccctgcaaagtaaactggatggctttctcgccgccaaggatctgatggcgcaggggatcaagctctgatcaagagacaggatgaggatcgtttcgcatgattgaacaagatggattgcacgcaggttctccggccgcttgggtggagaggctattcggctatgactgggcacaacagacaatcggctgctctgatgccgccgtgttccggctgtcagcgcaggggcgcccggttctttttgtcaagaccgacctgtccggtgccctgaatgaactgcaagacgaggcagcgcggctatcgtggctggccacgacgggcgttccttgcgcagctgtgctcgacgttgtcactgaagcgggaagggactggctgctattgggcgaagtgccggggcaggatctcctgtcatctcaccttgctcctgccgagaaagtatccatcatggctgatgcaatgcggcggctgcatacgcttgatccggctacctgcccattcgaccaccaagcgaaacatcgcatcgagcgagcacgtactcggatggaagccggtcttgtcgatcaggatgatctggacgaagagcatcaggggctcgcgccagccgaactgttcgccaggctcaaggcgagcatgcccgacggcgaggatctcgtcgtgacccatggcgatgcctgcttgccgaatatcatggtggaaaatggccgcttttctggattcatcgactgtggccggctgggtgtggcggaccgctatcaggacatagcgttggctacccgtgatattgctgaagagcttggcggcgaatgggctgaccgcttcctcgtgctttacggtatcgccgctcccgattcgcagcgcatcgccttctatcgccttcttgacgagttcttctgaattattaacgcttacaatttcctgatgcggtattttctccttacgcatctgtgcggtatttcacaccgcatacaggtggcacttttcggggaaatgtgcgcggaacccctatttgtttatttttctaaatacattcaaatatgtatccgctcatgagacaataaccctgataaatgcttcaataatagcacgtgaggagggccaccatggccaagttgaccagtgccgttccggtgctcaccgcgcgcgacgtcgccggagcggtcgagttctggaccgaccggctcgggttctcccgggacttcgtggaggacgacttcgccggtgtggtccgggacgacgtgaccctgttcatcagcgcggtccaggaccaggtggtgccggacaacaccctggcctgggtgtgggtgcgcggcctggacgagctgtacgccgagtggtcggaggtcgtgtccacgaacttccgggacgcctccgggccggccatgaccgagatcggcgagcagccgtgggggcgggagttcgccctgcgcgacccggccggcaactgcgtgcacttcgtggccgaggagcaggactgacacgtgctaaaacttcatttttaatttaaaaggatctaggtgaagatcctttttgataatctcatgaccaaaatcccttaacgtgagttttcgttccactgagcgtcagaccccgtagaaaagatcaaaggatcttcttgagatcctttttttctgcgcgtaatctgctgcttgcaaacaaaaaaaccaccgctaccagcggtggtttgtttgccggatcaagagctaccaactctttttccgaaggtaactggcttcagcagagcgcagataccaaatactgtccttctagtgtagccgtagttaggccaccacttcaagaactctgtagcaccgcctacatacctcgctctgctaatcctgttaccagtggctgctgccagtggcgataagtcgtgtcttaccgggttggactcaagacgatagttaccggataaggcgcagcggtcgggctgaacggggggttcgtgcacacagcccagcttggagcgaacgacctacaccgaactgagatacctacagcgtgagctatgagaaagcgccacgcttcccgaagggagaaaggcggacaggtatccggtaagcggcagggtcggaacaggagagcgcacgagggagcttccagggggaaacgcctggtatctttatagtcctgtcgggtttcgccacctctgacttgagcgtcgatttttgtgatgctcgtcaggggggcggagcctatggaaaaacgccagcaacgcggcctttttacggttcctgggcttttgctggccttttgctcacatgttctttcctgcgttatcccctgattctgtggataaccgtattaccgcctttgagtgagctgataccgctcgccgcagccgaacgaccgagcgcagcgagtcagtgagcgaggaagcggaagagcgcccaatacgcaaaccgcctctccccgcgcgttggccgattcattaatgcagctggcacgacaggtttcccgactggaaagcgggcagtgagcgcaacgcaattaatgtgagttagctcactcattaggcaccccaggctttacactttatgcttccggctcgtatgttgtgtggaattgtgagcggataacaatttcacacaggaaacagctatgaccatgattacgccaagctatttaggtgacactatagaatactcaagctatgcatc

SEQ ID NO: 34 - DNA, 5408 bp, Artificial Sequence
  Synthetic DNA vector
aagcttggtacttaatcgaaaaaaaaacagacagccatgtgctcttcggccttaattaaggtgcgtttttatgcttgtagtattgtataatgtttttaagatcctagggataacagggtaatgagctcggatccactagtaacggccgccagtgtgctggaattcccgatctagtaacatagatgacaccgcgcgcgataatttatcctagtttgcgcgctatattttgttttctatcgcgtattaaatgtataattgcgggactctaatcataaaaacccatctcataaataacgtcatgcattacatgttaattattacatgcttaacgtaattcaacagaaattatatgataatcatcgcaagaccggcaacaggattcaatcttaagaaactttattgccaaatgtttgaacgatcggggatcatccgggtctgtggcgggaactccacgaaaatatccgaacgcagcaagatatcgcggtgcatctcggtcttgcctgggcagtcgccgccgacgccgttgatgtggacgccgggcccgatcatattgtcgctcaggatcgtggcgttgtgcttgtcggccgttgctgtcgtaatgatatcggcaccttcgaccgcctgttccgcagagatcccgtgggcgaagaactccagcatgagatccccgcgctggaggatcatccagccggcgtcccggaaaacgattccgaagcccaacctttcatagaaggcggcggtggaatcgaaatctcgtgatggcaggttgggcgtcgcttggtcggtcatttcgaaccccagagtcccgctcagaagaactcgtcaagaaggcgatagaaggcgatgcgctgcgaatcgggagcggcgataccgtaaagcacgaggaagcggtcagcccattcgccgccaagctcttcagcaatatcacgggtagccaacgctatgtcctgatagcggtccgccacacccagccggccacagtcgatgaatccagaaaagcggccattttccaccatgatattcggcaagcaggcatcgccatgggtcacgacgagatcatcgccgtcgggcatgcgcgccttgagcctggcgaacagttcggctggcgcgagcccctgatgctcttcgtccagatcatcctgatcgacaagaccggcttccatccgagtacgtgctcgctcgatgcgatgtttcgcttggtggtcgaatgggcaggtagccggatcaagcgtatgcagccgccgcattgcatcagccatgatggatactttctcggcaggagcaaggtgagatgacaggagatcctgccccggcacttcgcccaatagcagccagtcccttcccgcttcagtgacaacgtcgagcacagctgcgcaaggaacgcccgtcgtggccagccacgatagccgcgctgcctcgtcctgcagttcattcagggcaccggacaggtcggtcttgacaaaaagaaccgggcgcccctgcgctgacagccggaacacggcggcatcagagcagccgattgtctgttgtgcccagtcatagccgaatagcctctccacccaagcggccggagaacctgcgtgcaatccatcttgttcaatcatgcgaaacgatccagatccggtgcagattatttggattgagagtgaatatgagactctaattggataccgaggggaatttatggaacgtcagtggagcatttttgacaagaaatatttgctagctgatagtgaccttaggcgacttttgaacgcgcaataatggtttctgacgtatgtgcttagctcattaaactccagaaacccgcggctgagtggctccttcaacgttgcggttctgtcagttccaaacgtaaaacggcttgtcccgcgtcatcggcgggggtcataacgtgactcccttaattctccgctcatgatgaattctgcagatatccatcacactggcggccgcggtatcactagtattacagaggtaagttataacagtcgcctaacctctagagggcccaattcgccctatagtgagtcgtattacaattcactggccgtcgttttacaacgtcgtgactgggaaaaccctggcgttacccaacttaatcgccttgcagcacatccccctttcgccagctggcgtaatagcgaagaggcccgcaccgatcgcccttcccaacagttgcgcagcctatacgtacggcagtttaaggtttacacctataaaagagagagccgttatcgtctgtttgtggatgtacagagtgatattattgacacgccggggcgacggatggtgatccccctggccagtgcacgtctgctgtcagataaagtctcccgtgaactttacccggtggtgcatatcggggatgaaagctggcgcatgatgaccaccgatatggccagtgtgccggtctccgttatcggggaagaagtggctgatctcagccaccgcgaaaatgacatcaaaaacgccattaacctgatgttctggggaatataaatgtcaggcatgagattatcaaaaaggatcttcacctagatccttttcacgtagaaagccagtccgcagaaacggtgctgaccccggatgaatgtcagctactgggctatctggacaagggaaaacgcaagcgcaaagagaaagcaggtagcttgcagtgggcttacatggcgatagctagactgggcggttttatggacagcaagcgaaccggaattgccagctggggcgccctctggtaaggttgggaagccctgcaaagtaaactggatggctttctcgccgccaaggatctgatggcgcaggggatcaagctctgatcaagagacaggatgaggatcgtttcgcatgattgaacaagatggattgcacgcaggttctccggccgcttgggtggagaggctattcggctatgactgggcacaacagacaatcggctgctctgatgccgccgtgttccggctgtcagcgcaggggcgcccggttctttttgtcaagaccgacctgtccggtgccctgaatgaactgcaagacgaggcagcgcggctatcgtggctggccacgacgggcgttccttgcgcagctgtgctcgacgttgtcactgaagcgggaagggactggctgctattgggcgaagtgccggggcaggatctcctgtcatctcaccttgctcctgccgagaaagtatccatcatggctgatgcaatgcggcggctgcatacgcttgatccggctacctgcccattcgaccaccaagcgaaacatcgcatcgagcgagcacgtactcggatggaagccggtcttgtcgatcaggatgatctggacgaagagcatcaggggctcgcgccagccgaactgttcgccaggctcaaggcgagcatgcccgacggcgaggatctcgtcgtgacccatggcgatgcctgcttgccgaatatcatggtggaaaatggccgcttttctggattcatcgactgtggccggctgggtgtggcggaccgctatcaggacatagcgttggctacccgtgatattgctgaagagcttggcggcgaatgggctgaccgcttcctcgtgctttacggtatcgccgctcccgattcgcagcgcatcgccttctatcgccttcttgacgagttcttctgaattattaacgcttacaatttcctgatgcggtattttctccttacgcatctgtgcggtatttcacaccgcatacaggtggcacttttcggggaaatgtgcgcggaacccctatttgtttatttttctaaatacattcaaatatgtatccgctcatgagacaataaccctgataaatgcttcaataatagcacgtgaggagggccaccatggccaagttgaccagtgccgttccggtgctcaccgcgcgcgacgtcgccggagcggtcgagttctggaccgaccggctcgggttctcccgggacttcgtggaggacgacttcgccggtgtggtccgggacgacgtgaccctgttcatcagcgcggtccaggaccaggtggtgccggacaacaccctggcctgggtgtgggtgcgcggcctggacgagctgtacgccgagtggtcggaggtcgtgtccacgaacttccgggacgcctccgggccggccatgaccgagatcggcgagcagccgtgggggcgggagttcgccctgcgcgacccggccggcaactgcgtgcacttcgtggccgaggagcaggactgacacgtgctaaaacttcatttttaatttaaaaggatctaggtgaagatcctttttgataatctcatgaccaaaatcccttaacgtgagttttcgttccactgagcgtcagaccccgtagaaaagatcaaaggatcttcttgagatcctttttttctgcgcgtaatctgctgcttgcaaacaaaaaaaccaccgctaccagcggtggtttgtttgccggatcaagagctaccaactctttttccgaaggtaactggcttcagcagagcgcagataccaaatactgtccttctagtgtagccgtagttaggccaccacttcaagaactctgtagcaccgcctacatacctcgctctgctaatcctgttaccagtggctgctgccagtggcgataagtcgtgtcttaccgggttggactcaagacgatagttaccggataaggcgcagcggtcgggctgaacggggggttcgtgcacacagcccagcttggagcgaacgacctacaccgaactgagatacctacagcgtgagctatgagaaagcgccacgcttcccgaagggagaaaggcggacaggtatccggtaagcggcagggtcggaacaggagagcgcacgagggagcttccagggggaaacgcctggtatctttatagtcctgtcgggtttcgccacctctgacttgagcgtcgatttttgtgatgctcgtcaggggggcggagcctatggaaaaacgccagcaacgcggcctttttacggttcctgggcttttgctggccttttgctcacatgttctttcctgcgttatcccctgattctgtggataaccgtattaccgcctttgagtgagctgataccgctcgccgcagccgaacgaccgagcgcagcgagtcagtgagcgaggaagcggaagagcgcccaatacgcaaaccgcctctccccgcgcgttggccgattcattaatgcagctggcacgacaggtttcccgactggaaagcgggcagtgagcgcaacgcaattaatgtgagttagctcactcattaggcaccccaggctttacactttatgcttccggctcgtatgttgtgtggaattgtgagcggataacaatttcacacaggaaacagctatgaccatgattacgccaagctatttaggtgacactatagaatactcaagctatgcatc

SEQ ID NO: 35 - DNA, 5408 bp, Artificial Sequence
  Synthetic DNA vector
aagcttggtggacatgattatggaacacacacacgctagccgcccagttccttaattaaggtgcgtttttatgcttgtagtattgtataatgtttttaagatcctagggataacagggtaatgagctcggatccactagtaacggccgccagtgtgctggaattcccgatctagtaacatagatgacaccgcgcgcgataatttatcctagtttgcgcgctatattttgttttctatcgcgtattaaatgtataattgcgggactctaatcataaaaacccatctcataaataacgtcatgcattacatgttaattattacatgcttaacgtaattcaacagaaattatatgataatcatcgcaagaccggcaacaggattcaatcttaagaaactttattgccaaatgtttgaacgatcggggatcatccgggtctgtggcgggaactccacgaaaatatccgaacgcagcaagatatcgcggtgcatctcggtcttgcctgggcagtcgccgccgacgccgttgatgtggacgccgggcccgatcatattgtcgctcaggatcgtggcgttgtgcttgtcggccgttgctgtcgtaatgatatcggcaccttcgaccgcctgttccgcagagatcccgtgggcgaagaactccagcatgagatccccgcgctggaggatcatccagccggcgtcccggaaaacgattccgaagcccaacctttcatagaaggcggcggtggaatcgaaatctcgtgatggcaggttgggcgtcgcttggtcggtcatttcgaaccccagagtcccgctcagaagaactcgtcaagaaggcgatagaaggcgatgcgctgcgaatcgggagcggcgataccgtaaagcacgaggaagcggtcagcccattcgccgccaagctcttcagcaatatcacgggtagccaacgctatgtcctgatagcggtccgccacacccagccggccacagtcgatgaatccagaaaagcggccattttccaccatgatattcggcaagcaggcatcgccatgggtcacgacgagatcatcgccgtcgggcatgcgcgccttgagcctggcgaacagttcggctggcgcgagcccctgatgctcttcgtccagatcatcctgatcgacaagaccggcttccatccgagtacgtgctcgctcgatgcgatgtttcgcttggtggtcgaatgggcaggtagccggatcaagcgtatgcagccgccgcattgcatcagccatgatggatactttctcggcaggagcaaggtgagatgacaggagatcctgccccggcacttcgcccaatagcagccagtcccttcccgcttcagtgacaacgtcgagcacagctgcgcaaggaacgcccgtcgtggccagccacgatagccgcgctgcctcgtcctgcagttcattcagggcaccggacaggtcggtcttgacaaaaagaaccgggcgcccctgcgctgacagccggaacacggcggcatcagagcagccgattgtctgttgtgcccagtcatagccgaatagcctctccacccaagcggccggagaacctgcgtgcaatccatcttgttcaatcatgcgaaacgatccagatccggtgcagattatttggattgagagtgaatatgagactctaattggataccgaggggaatttatggaacgtcagtggagcatttttgacaagaaatatttgctagctgatagtgaccttaggcgacttttgaacgcgcaataatggtttctgacgtatgtgcttagctcattaaactccagaaacccgcggctgagtggctccttcaacgttgcggttctgtcagttccaaacgtaaaacggcttgtcccgcgtcatcggcgggggtcataacgtgactcccttaattctccgctcatgatgaattctgcagatatccatcacactggcggccgcggtatcactagtattacagaggtaagttataacagtcgcctaacctctagagggcccaattcgccctatagtgagtcgtattacaattcactggccgtcgttttacaacgtcgtgactgggaaaaccctggcgttacccaacttaatcgccttgcagcacatccccctttcgccagctggcgtaatagcgaagaggcccgcaccgatcgcccttcccaacagttgcgcagcctatacgtacggcagtttaaggtttacacctataaaagagagagccgttatcgtctgtttgtggatgtacagagtgatattattgacacgccggggcgacggatggtgatccccctggccagtgcacgtctgctgtcagataaagtctcccgtgaactttacccggtggtgcatatcggggatgaaagctggcgcatgatgaccaccgatatggccagtgtgccggtctccgttatcggggaagaagtggctgatctcagccaccgcgaaaatgacatcaaaaacgccattaacctgatgttctggggaatataaatgtcaggcatgagattatcaaaaaggatcttcacctagatccttttcacgtagaaagccagtccgcagaaacggtgctgaccccggatgaatgtcagctactgggctatctggacaagggaaaacgcaagcgcaaagagaaagcaggtagcttgcagtgggcttacatggcgatagctagactgggcggttttatggacagcaagcgaaccggaattgccagctggggcgccctctggtaaggttgggaagccctgcaaagtaaactggatggctttctcgccgccaaggatctgatggcgcaggggatcaagctctgatcaagagacaggatgaggatcgtttcgcatgattgaacaagatggattgcacgcaggttctccggccgcttgggtggagaggctattcggctatgactgggcacaacagacaatcggctgctctgatgccgccgtgttccggctgtcagcgcaggggcgcccggttctttttgtcaagaccgacctgtccggtgccctgaatgaactgcaagacgaggcagcgcggctatcgtggctggccacgacgggcgttccttgcgcagctgtgctcgacgttgtcactgaagcgggaagggactggctgctattgggcgaagtgccggggcaggatctcctgtcatctcaccttgctcctgccgagaaagtatccatcatggctgatgcaatgcggcggctgcatacgcttgatccggctacctgcccattcgaccaccaagcgaaacatcgcatcgagcgagcacgtactcggatggaagccggtcttgtcgatcaggatgatctggacgaagagcatcaggggctcgcgccagccgaactgttcgccaggctcaaggcgagcatgcccgacggcgaggatctcgtcgtgacccatggcgatgcctgcttgccgaatatcatggtggaaaatggccgcttttctggattcatcgactgtggccggctgggtgtggcggaccgctatcaggacatagcgttggctacccgtgatattgctgaagagcttggcggcgaatgggctgaccgcttcctcgtgctttacggtatcgccgctcccgattcgcagcgcatcgccttctatcgccttcttgacgagttcttctgaattattaacgcttacaatttcctgatgcggtattttctccttacgcatctgtgcggtatttcacaccgcatacaggtggcacttttcggggaaatgtgcgcggaacccctatttgtttatttttctaaatacattcaaatatgtatccgctcatgagacaataaccctgataaatgcttcaataatagcacgtgaggagggccaccatggccaagttgaccagtgccgttccggtgctcaccgcgcgcgacgtcgccggagcggtcgagttctggaccgaccggctcgggttctcccgggacttcgtggaggacgacttcgccggtgtggtccgggacgacgtgaccctgttcatcagcgcggtccaggaccaggtggtgccggacaacaccctggcctgggtgtgggtgcgcggcctggacgagctgtacgccgagtggtcggaggtcgtgtccacgaacttccgggacgcctccgggccggccatgaccgagatcggcgagcagccgtgggggcgggagttcgccctgcgcgacccggccggcaactgcgtgcacttcgtggccgaggagcaggactgacacgtgctaaaacttcatttttaatttaaaaggatctaggtgaagatcctttttgataatctcatgaccaaaatcccttaacgtgagttttcgttccactgagcgtcagaccccgtagaaaagatcaaaggatcttcttgagatcctttttttctgcgcgtaatctgctgcttgcaaacaaaaaaaccaccgctaccagcggtggtttgtttgccggatcaagagctaccaactctttttccgaaggtaactggcttcagcagagcgcagataccaaatactgtccttctagtgtagccgtagttaggccaccacttcaagaactctgtagcaccgcctacatacctcgctctgctaatcctgttaccagtggctgctgccagtggcgataagtcgtgtcttaccgggttggactcaagacgatagttaccggataaggcgcagcggtcgggctgaacggggggttcgtgcacacagcccagcttggagcgaacgacctacaccgaactgagatacctacagcgtgagctatgagaaagcgccacgcttcccgaagggagaaaggcggacaggtatccggtaagcggcagggtcggaacaggagagcgcacgagggagcttccagggggaaacgcctggtatctttatagtcctgtcgggtttcgccacctctgacttgagcgtcgatttttgtgatgctcgtcaggggggcggagcctatggaaaaacgccagcaacgcggcctttttacggttcctgggcttttgctggccttttgctcacatgttctttcctgcgttatcccctgattctgtggataaccgtattaccgcctttgagtgagctgataccgctcgccgcagccgaacgaccgagcgcagcgagtcagtgagcgaggaagcggaagagcgcccaatacgcaaaccgcctctccccgcgcgttggccgattcattaatgcagctggcacgacaggtttcccgactggaaagcgggcagtgagcgcaacgcaattaatgtgagttagctcactcattaggcaccccaggctttacactttatgcttccggctcgtatgttgtgtggaattgtgagcggataacaatttcacacaggaaacagctatgaccatgattacgccaagctatttaggtgacactatagaatactcaagctatgcatc

SEQ ID NO: 36 - DNA, 5408 bp, Artificial Sequence
  Synthetic DNA vector
aagcttggtgagcccaaacagcgaaatacctgagcgaacaaatactactccttaattaaggtgcgtttttatgcttgtagtattgtataatgtttttaagatcctagggataacagggtaatgagctcggatccactagtaacggccgccagtgtgctggaattcccgatctagtaacatagatgacaccgcgcgcgataatttatcctagtttgcgcgctatattttgttttctatcgcgtattaaatgtataattgcgggactctaatcataaaaacccatctcataaataacgtcatgcattacatgttaattattacatgcttaacgtaattcaacagaaattatatgataatcatcgcaagaccggcaacaggattcaatcttaagaaactttattgccaaatgtttgaacgatcggggatcatccgggtctgtggcgggaactccacgaaaatatccgaacgcagcaagatatcgcggtgcatctcggtcttgcctgggcagtcgccgccgacgccgttgatgtggacgccgggcccgatcatattgtcgctcaggatcgtggcgttgtgcttgtcggccgttgctgtcgtaatgatatcggcaccttcgaccgcctgttccgcagagatcccgtgggcgaagaactccagcatgagatccccgcgctggaggatcatccagccggcgtcccggaaaacgattccgaagcccaacctttcatagaaggcggcggtggaatcgaaatctcgtgatggcaggttgggcgtcgcttggtcggtcatttcgaaccccagagtcccgctcagaagaactcgtcaagaaggcgatagaaggcgatgcgctgcgaatcgggagcggcgataccgtaaagcacgaggaagcggtcagcccattcgccgccaagctcttcagcaatatcacgggtagccaacgctatgtcctgatagcggtccgccacacccagccggccacagtcgatgaatccagaaaagcggccattttccaccatgatattcggcaagcaggcatcgccatgggtcacgacgagatcatcgccgtcgggcatgcgcgccttgagcctggcgaacagttcggctggcgcgagcccctgatgctcttcgtccagatcatcctgatcgacaagaccggcttccatccgagtacgtgctcgctcgatgcgatgtttcgcttggtggtcgaatgggcaggtagccggatcaagcgtatgcagccgccgcattgcatcagccatgatggatactttctcggcaggagcaaggtgagatgacaggagatcctgccccggcacttcgcccaatagcagccagtcccttcccgcttcagtgacaacgtcgagcacagctgcgcaaggaacgcccgtcgtggccagccacgatagccgcgctgcctcgtcctgcagttcattcagggcaccggacaggtcggtcttgacaaaaagaaccgggcgcccctgcgctgacagccggaacacggcggcatcagagcagccgattgtctgttgtgcccagtcatagccgaatagcctctccacccaagcggccggagaacctgcgtgcaatccatcttgttcaatcatgcgaaacgatccagatccggtgcagattatttggattgagagtgaatatgagactctaattggataccgaggggaatttatggaacgtcagtggagcatttttgacaagaaatatttgctagctgatagtgaccttaggcgacttttgaacgcgcaataatggtttctgacgtatgtgcttagctcattaaactccagaaacccgcggctgagtggctccttcaacgttgcggttctgtcagttccaaacgtaaaacggcttgtcccgcgtcatcggcgggggtcataacgtgactcccttaattctccgctcatgatgaattctgcagatatccatcacactggcggccgcggtatcactagtattacagaggtaagttataacagtcgcctaacctctagagggcccaattcgccctatagtgagtcgtattacaattcactggccgtcgttttacaacgtcgtgactgggaaaaccctggcgttacccaacttaatcgccttgcagcacatccccctttcgccagctggcgtaatagcgaagaggcccgcaccgatcgcccttcccaacagttgcgcagcctatacgtacggcagtttaaggtttacacctataaaagagagagccgttatcgtctgtttgtggatgtacagagtgatattattgacacgccggggcgacggatggtgatccccctggccagtgcacgtctgctgtcagataaagtctcccgtgaactttacccggtggtgcatatcggggatgaaagctggcgcatgatgaccaccgatatggccagtgtgccggtctccgttatcggggaagaagtggctgatctcagccaccgcgaaaatgacatcaaaaacgccattaacctgatgttctggggaatataaatgtcaggcatgagattatcaaaaaggatcttcacctagatccttttcacgtagaaagccagtccgcagaaacggtgctgaccccggatgaatgtcagctactgggctatctggacaagggaaaacgcaagcgcaaagagaaagcaggtagcttgcagtgggcttacatggcgatagctagactgggcggttttatggacagcaagcgaaccggaattgccagctggggcgccctctggtaaggttgggaagccctgcaaagtaaactggatggctttctcgccgccaaggatctgatggcgcaggggatcaagctctgatcaagagacaggatgaggatcgtttcgcatgattgaacaagatggattgcacgcaggttctccggccgcttgggtggagaggctattcggctatgactgggcacaacagacaatcggctgctctgatgccgccgtgttccggctgtcagcgcaggggcgcccggttctttttgtcaagaccgacctgtccggtgccctgaatgaactgcaagacgaggcagcgcggctatcgtggctggccacgacgggcgttccttgcgcagctgtgctcgacgttgtcactgaagcgggaagggactggctgctattgggcgaagtgccggggcaggatctcctgtcatctcaccttgctcctgccgagaaagtatccatcatggctgatgcaatgcggcggctgcatacgcttgatccggctacctgcccattcgaccaccaagcgaaacatcgcatcgagcgagcacgtactcggatggaagccggtcttgtcgatcaggatgatctggacgaagagcatcaggggctcgcgccagccgaactgttcgccaggctcaaggcgagcatgcccgacggcgaggatctcgtcgtgacccatggcgatgcctgcttgccgaatatcatggtggaaaatggccgcttttctggattcatcgactgtggccggctgggtgtggcggaccgctatcaggacatagcgttggctacccgtgatattgctgaagagcttggcggcgaatgggctgaccgcttcctcgtgctttacggtatcgccgctcccgattcgcagcgcatcgccttctatcgccttcttgacgagttcttctgaattattaacgcttacaatttcctgatgcggtattttctccttacgcatctgtgcggtatttcacaccgcatacaggtggcacttttcggggaaatgtgcgcggaacccctatttgtttatttttctaaatacattcaaatatgtatccgctcatgagacaataaccctgataaatgcttcaataatagcacgtgaggagggccaccatggccaagttgaccagtgccgttccggtgctcaccgcgcgcgacgtcgccggagcggtcgagttctggaccgaccggctcgggttctcccgggacttcgtggaggacgacttcgccggtgtggtccgggacgacgtgaccctgttcatcagcgcggtccaggaccaggtggtgccggacaacaccctggcctgggtgtgggtgcgcggcctggacgagctgtacgccgagtggtcggaggtcgtgtccacgaacttccgggacgcctccgggccggccatgaccgagatcggcgagcagccgtgggggcgggagttcgccctgcgcgacccggccggcaactgcgtgcacttcgtggccgaggagcaggactgacacgtgctaaaacttcatttttaatttaaaaggatctaggtgaagatcctttttgataatctcatgaccaaaatcccttaacgtgagttttcgttccactgagcgtcagaccccgtagaaaagatcaaaggatcttcttgagatcctttttttctgcgcgtaatctgctgcttgcaaacaaaaaaaccaccgctaccagcggtggtttgtttgccggatcaagagctaccaactctttttccgaaggtaactggcttcagcagagcgcagataccaaatactgtccttctagtgtagccgtagttaggccaccacttcaagaactctgtagcaccgcctacatacctcgctctgctaatcctgttaccagtggctgctgccagtggcgataagtcgtgtcttaccgggttggactcaagacgatagttaccggataaggcgcagcggtcgggctgaacggggggttcgtgcacacagcccagcttggagcgaacgacctacaccgaactgagatacctacagcgtgagctatgagaaagcgccacgcttcccgaagggagaaaggcggacaggtatccggtaagcggcagggtcggaacaggagagcgcacgagggagcttccagggggaaacgcctggtatctttatagtcctgtcgggtttcgccacctctgacttgagcgtcgatttttgtgatgctcgtcaggggggcggagcctatggaaaaacgccagcaacgcggcctttttacggttcctgggcttttgctggccttttgctcacatgttctttcctgcgttatcccctgattctgtggataaccgtattaccgcctttgagtgagctgataccgctcgccgcagccgaacgaccgagcgcagcgagtcagtgagcgaggaagcggaagagcgcccaatacgcaaaccgcctctccccgcgcgttggccgattcattaatgcagctggcacgacaggtttcccgactggaaagcgggcagtgagcgcaacgcaattaatgtgagttagctcactcattaggcaccccaggctttacactttatgcttccggctcgtatgttgtgtggaattgtgagcggataacaatttcacacaggaaacagctatgaccatgattacgccaagctatttaggtgacactatagaatactcaagctatgcatc

SEQ ID NO: 37 - DNA, 5855 bp, Artificial Sequence
  Synthetic DNA vector
aagcttggtgcgtttttatgcttgtagtattgtataatgtttttaagatccttaattaaggtgcgtttttatgcttgtagtattgtataatgtttttaagatcctagggataacagggtaatgagctcggatccactagtctcacaattccacacaacatacgagccggaagcataaagtgtaaagcctggggtgcctaatgagtgagctaactcacattaggctgaattaggcgcgcctatttctattaattcccgatctagtaacatagatgacaccgcgcgcgataatttatcctagtttgcgcgctatattttgttttctatcgcgtattaaatgtataattgcgggactctaatcataaaaacccatctcataaataacgtcatgcattacatgttaattattacatgcttaacgtaattcaacagaaattatatgataatcatcgcaagaccggcaacaggattcaatcttaagaaactttattgccaaatgtttgaacgatcggggaaattcgggggatcgatcccgcgaactgtggacgagaactgtgccaccaagcgtaaggccgttctctcgcatttgccttgctaggctcgcgcgagttgctggctgaggcgttctcgaaatcagctcttgttcggtcggcatctactctattcctttgccctcggacgagtgctggggcgtcggtttccactatcggcgagtacttctacacagccatcggtccagacggccgcgcttctgcgggcgatttgtgtacgcccgacagtcccggctccggatcggacgattgcgtcgcatcgaccctgcgcccaagctgcatcatcgaaattgccgtcaaccaagctctgatagagttggtcaagaccaatgcggagcatatacgcccggagccgcggcgatcctgcaagctccggatgcctccgctcgaagtagcgcgtctgctgctccatacaagccaaccacggcctccagaagaagatgttggcgacctcgtattgggaatccccgaacatcgcctcgctccagtcaatgaccgctgttatgcggccattgtccgtcaggacattgttggagccgaaatccgcgtgcacgaggtgccggacttcggggcagtcctcggcccaaagcatcagctcatcgagagcctgcgcgacggacgcactgacggtgtcgtccatcacagtttgccagtgatacacatggggatcagcaatcgcgcatatgaaatcacgccatgtagtgtattgaccgattccttgcggtccgaatgggccgaacccgctcgtctggctaagatcggccgcagcgatcgcatccatggcctccgcgaccggctgcagaacagcgggcagttcggtttcaggcaggtcttgcaacgtgacaccctgtgcacggcgggagatgcaataggtcaggctctcgctgaatgccccaatgtcaagcacttccggaatcgggagcgcggccgatgcaaagtgccgataaacataacgatctttgtagaaaccatcggcgcagctatttacccgcaggacatatccacgccctcctacatcgaagctgaaagcacgagattcttcgccctccgagagctgcatcaggtcggagacgctgtcgaacttttcgatcagaaacttctcgacagacgtcgcggtgagttcaggctttttcatatcttattgccccccgggatcagatctggattgagagtgaatatgagactctaattggataccgaggggaatttatggaacgtcagtggagcatttttgacaagaaatatttgctagctgatagtgaccttaggcgacttttgaacgcgcaataatggtttctgacgtatgtgcttagctcattaaactccagaaacccgcggctgagtggctccttcaacgttgcggttctgtcagttccaaacgtaaaacggcttgtcccgcgtcatcggcgggggtcataacgtgactcccttaattctccgctcatgatcttgatcccctgcgccatcagatccttggcggcaagaaagccatccagtttactttgcagggcttcccaaccttaccagagggcgccccagctggcaattccggttcgcttgctgtccataaaaccgcccagtctagctatcgccatgtaagcccactgcaagctacctgctttctctttgcgcttgcgttttcccttgtccagatagcccagtagctgacattcatccggggtcagcaccgtttctgcggactggctttctacgtgttccgcttcctttagcagcccttgcgccctgagtgcttgcggcagcgtgaagctgatccgtcgagattaatagaaataaattcagcctaattcggcgttaattcagtacattaaaaacgtccgcaatgtggcggccgcggtatcactagtattacagaggtaagttataacagtcgcctaacctctagagggcccaattcgccctatagtgagtcgtattacaattcactggccgtcgttttacaacgtcgtgactgggaaaaccctggcgttacccaacttaatcgccttgcagcacatccccctttcgccagctggcgtaatagcgaagaggcccgcaccgatcgcccttcccaacagttgcgcagcctatacgtacggcagtttaaggtttacacctataaaagagagagccgttatcgtctgtttgtggatgtacagagtgatattattgacacgccggggcgacggatggtgatccccctggccagtgcacgtctgctgtcagataaagtctcccgtgaactttacccggtggtgcatatcggggatgaaagctggcgcatgatgaccaccgatatggccagtgtgccggtctccgttatcggggaagaagtggctgatctcagccaccgcgaaaatgacatcaaaaacgccattaacctgatgttctggggaatataaatgtcaggcatgagattatcaaaaaggatcttcacctagatccttttcacgtagaaagccagtccgcagaaacggtgctgaccccggatgaatgtcagctactgggctatctggacaagggaaaacgcaagcgcaaagagaaagcaggtagcttgcagtgggcttacatggcgatagctagactgggcggttttatggacagcaagcgaaccggaattgccagctggggcgccctctggtaaggttgggaagccctgcaaagtaaactggatggctttctcgccgccaaggatctgatggcgcaggggatcaagctctgatcaagagacaggatgaggatcgtttcgcatgattgaacaagatggattgcacgcaggttctccggccgcttgggtggagaggctattcggctatgactgggcacaacagacaatcggctgctctgatgccgccgtgttccggctgtcagcgcaggggcgcccggttctttttgtcaagaccgacctgtccggtgccctgaatgaactgcaagacgaggcagcgcggctatcgtggctggccacgacgggcgttccttgcgcagctgtgctcgacgttgtcactgaagcgggaagggactggctgctattgggcgaagtgccggggcaggatctcctgtcatctcaccttgctcctgccgagaaagtatccatcatggctgatgcaatgcggcggctgcatacgcttgatccggctacctgcccattcgaccaccaagcgaaacatcgcatcgagcgagcacgtactcggatggaagccggtcttgtcgatcaggatgatctggacgaagagcatcaggggctcgcgccagccgaactgttcgccaggctcaaggcgagcatgcccgacggcgaggatctcgtcgtgacccatggcgatgcctgcttgccgaatatcatggtggaaaatggccgcttttctggattcatcgactgtggccggctgggtgtggcggaccgctatcaggacatagcgttggctacccgtgatattgctgaagagcttggcggcgaatgggctgaccgcttcctcgtgctttacggtatcgccgctcccgattcgcagcgcatcgccttctatcgccttcttgacgagttcttctgaattattaacgcttacaatttcctgatgcggtattttctccttacgcatctgtgcggtatttcacaccgcatacaggtggcacttttcggggaaatgtgcgcggaacccctatttgtttatttttctaaatacattcaaatatgtatccgctcatgagacaataaccctgataaatgcttcaataatagcacgtgaggagggccaccatggccaagttgaccagtgccgttccggtgctcaccgcgcgcgacgtcgccggagcggtcgagttctggaccgaccggctcgggttctcccgggacttcgtggaggacgacttcgccggtgtggtccgggacgacgtgaccctgttcatcagcgcggtccaggaccaggtggtgccggacaacaccctggcctgggtgtgggtgcgcggcctggacgagctgtacgccgagtggtcggaggtcgtgtccacgaacttccgggacgcctccgggccggccatgaccgagatcggcgagcagccgtgggggcgggagttcgccctgcgcgacccggccggcaactgcgtgcacttcgtggccgaggagcaggactgacacgtgctaaaacttcatttttaatttaaaaggatctaggtgaagatcctttttgataatctcatgaccaaaatcccttaacgtgagttttcgttccactgagcgtcagaccccgtagaaaagatcaaaggatcttcttgagatcctttttttctgcgcgtaatctgctgcttgcaaacaaaaaaaccaccgctaccagcggtggtttgtttgccggatcaagagctaccaactctttttccgaaggtaactggcttcagcagagcgcagataccaaatactgtccttctagtgtagccgtagttaggccaccacttcaagaactctgtagcaccgcctacatacctcgctctgctaatcctgttaccagtggctgctgccagtggcgataagtcgtgtcttaccgggttggactcaagacgatagttaccggataaggcgcagcggtcgggctgaacggggggttcgtgcacacagcccagcttggagcgaacgacctacaccgaactgagatacctacagcgtgagctatgagaaagcgccacgcttcccgaagggagaaaggcggacaggtatccggtaagcggcagggtcggaacaggagagcgcacgagggagcttccagggggaaacgcctggtatctttatagtcctgtcgggtttcgccacctctgacttgagcgtcgatttttgtgatgctcgtcaggggggcggagcctatggaaaaacgccagcaacgcggcctttttacggttcctgggcttttgctggccttttgctcacatgttctttcctgcgttatcccctgattctgtggataaccgtattaccgcctttgagtgagctgataccgctcgccgcagccgaacgaccgagcgcagcgagtcagtgagcgaggaagcggaagagcgcccaatacgcaaaccgcctctccccgcgcgttggccgattcattaatgcagctggcacgacaggtttcccgactggaaagcgggcagtgagcgcaacgcaattaatgtgagttagctcactcattaggcaccccaggctttacactttatgcttccggctcgtatgttgtgtggaattgtgagcggataacaatttcacacaggaaacagctatgaccatgattacgccaagctatttaggtgacactatagaatactcaagctatgcatc

SEQ ID NO: 38 - DNA, 5855 bp, Artificial Sequence
  Synthetic DNA vector
aagcttggtctaatacccaatctctcgtcttatccagatgttttatacgccttaattaaggtgcgtttttatgcttgtagtattgtataatgtttttaagatcctagggataacagggtaatgagctcggatccactagtctcacaattccacacaacatacgagccggaagcataaagtgtaaagcctggggtgcctaatgagtgagctaactcacattaggctgaattaggcgcgcctatttctattaattcccgatctagtaacatagatgacaccgcgcgcgataatttatcctagtttgcgcgctatattttgttttctatcgcgtattaaatgtataattgcgggactctaatcataaaaacccatctcataaataacgtcatgcattacatgttaattattacatgcttaacgtaattcaacagaaattatatgataatcatcgcaagaccggcaacaggattcaatcttaagaaactttattgccaaatgtttgaacgatcggggaaattcgggggatcgatcccgcgaactgtggacgagaactgtgccaccaagcgtaaggccgttctctcgcatttgccttgctaggctcgcgcgagttgctggctgaggcgttctcgaaatcagctcttgttcggtcggcatctactctattcctttgccctcggacgagtgctggggcgtcggtttccactatcggcgagtacttctacacagccatcggtccagacggccgcgcttctgcgggcgatttgtgtacgcccgacagtcccggctccggatcggacgattgcgtcgcatcgaccctgcgcccaagctgcatcatcgaaattgccgtcaaccaagctctgatagagttggtcaagaccaatgcggagcatatacgcccggagccgcggcgatcctgcaagctccggatgcctccgctcgaagtagcgcgtctgctgctccatacaagccaaccacggcctccagaagaagatgttggcgacctcgtattgggaatccccgaacatcgcctcgctccagtcaatgaccgctgttatgcggccattgtccgtcaggacattgttggagccgaaatccgcgtgcacgaggtgccggacttcggggcagtcctcggcccaaagcatcagctcatcgagagcctgcgcgacggacgcactgacggtgtcgtccatcacagtttgccagtgatacacatggggatcagcaatcgcgcatatgaaatcacgccatgtagtgtattgaccgattccttgcggtccgaatgggccgaacccgctcgtctggctaagatcggccgcagcgatcgcatccatggcctccgcgaccggctgcagaacagcgggcagttcggtttcaggcaggtcttgcaacgtgacaccctgtgcacggcgggagatgcaataggtcaggctctcgctgaatgccccaatgtcaagcacttccggaatcgggagcgcggccgatgcaaagtgccgataaacataacgatctttgtagaaaccatcggcgcagctatttacccgcaggacatatccacgccctcctacatcgaagctgaaagcacgagattcttcgccctccgagagctgcatcaggtcggagacgctgtcgaacttttcgatcagaaacttctcgacagacgtcgcggtgagttcaggctttttcatatcttattgccccccgggatcagatctggattgagagtgaatatgagactctaattggataccgaggggaatttatggaacgtcagtggagcatttttgacaagaaatatttgctagctgatagtgaccttaggcgacttttgaacgcgcaataatggtttctgacgtatgtgcttagctcattaaactccagaaacccgcggctgagtggctccttcaacgttgcggttctgtcagttccaaacgtaaaacggcttgtcccgcgtcatcggcgggggtcataacgtgactcccttaattctccgctcatgatcttgatcccctgcgccatcagatccttggcggcaagaaagccatccagtttactttgcagggcttcccaaccttaccagagggcgccccagctggcaattccggttcgcttgctgtccataaaaccgcccagtctagctatcgccatgtaagcccactgcaagctacctgctttctctttgcgcttgcgttttcccttgtccagatagcccagtagctgacattcatccggggtcagcaccgtttctgcggactggctttctacgtgttccgcttcctttagcagcccttgcgccctgagtgcttgcggcagcgtgaagctgatccgtcgagattaatagaaataaattcagcctaattcggcgttaattcagtacattaaaaacgtccgcaatgtggcggccgcggtatcactagtattacagaggtaagttataacagtcgcctaacctctagagggcccaattcgccctatagtgagtcgtattacaattcactggccgtcgttttacaacgtcgtgactgggaaaaccctggcgttacccaacttaatcgccttgcagcacatccccctttcgccagctggcgtaatagcgaagaggcccgcaccgatcgcccttcccaacagttgcgcagcctatacgtacggcagtttaaggtttacacctataaaagagagagccgttatcgtctgtttgtggatgtacagagtgatattattgacacgccggggcgacggatggtgatccccctggccagtgcacgtctgctgtcagataaagtctcccgtgaactttacccggtggtgcatatcggggatgaaagctggcgcatgatgaccaccgatatggccagtgtgccggtctccgttatcggggaagaagtggctgatctcagccaccgcgaaaatgacatcaaaaacgccattaacctgatgttctggggaatataaatgtcaggcatgagattatcaaaaaggatcttcacctagatccttttcacgtagaaagccagtccgcagaaacggtgctgaccccggatgaatgtcagctactgggctatctggacaagggaaaacgcaagcgcaaagagaaagcaggtagcttgcagtgggcttacatggcgatagctagactgggcggttttatggacagcaagcgaaccggaattgccagctggggcgccctctggtaaggttgggaagccctgcaaagtaaactggatggctttctcgccgccaaggatctgatggcgcaggggatcaagctctgatcaagagacaggatgaggatcgtttcgcatgattgaacaagatggattgcacgcaggttctccggccgcttgggtggagaggctattcggctatgactgggcacaacagacaatcggctgctctgatgccgccgtgttccggctgtcagcgcaggggcgcccggttctttttgtcaagaccgacctgtccggtgccctgaatgaactgcaagacgaggcagcgcggctatcgtggctggccacgacgggcgttccttgcgcagctgtgctcgacgttgtcactgaagcgggaagggactggctgctattgggcgaagtgccggggcaggatctcctgtcatctcaccttgctcctgccgagaaagtatccatcatggctgatgcaatgcggcggctgcatacgcttgatccggctacctgcccattcgaccaccaagcgaaacatcgcatcgagcgagcacgtactcggatggaagccggtcttgtcgatcaggatgatctggacgaagagcatcaggggctcgcgccagccgaactgttcgccaggctcaaggcgagcatgcccgacggcgaggatctcgtcgtgacccatggcgatgcctgcttgccgaatatcatggtggaaaatggccgcttttctggattcatcgactgtggccggctgggtgtggcggaccgctatcaggacatagcgttggctacccgtgatattgctgaagagcttggcggcgaatgggctgaccgcttcctcgtgctttacggtatcgccgctcccgattcgcagcgcatcgccttctatcgccttcttgacgagttcttctgaattattaacgcttacaatttcctgatgcggtattttctccttacgcatctgtgcggtatttcacaccgcatacaggtggcacttttcggggaaatgtgcgcggaacccctatttgtttatttttctaaatacattcaaatatgtatccgctcatgagacaataaccctgataaatgcttcaataatagcacgtgaggagggccaccatggccaagttgaccagtgccgttccggtgctcaccgcgcgcgacgtcgccggagcggtcgagttctggaccgaccggctcgggttctcccgggacttcgtggaggacgacttcgccggtgtggtccgggacgacgtgaccctgttcatcagcgcggtccaggaccaggtggtgccggacaacaccctggcctgggtgtgggtgcgcggcctggacgagctgtacgccgagtggtcggaggtcgtgtccacgaacttccgggacgcctccgggccggccatgaccgagatcggcgagcagccgtgggggcgggagttcgccctgcgcgacccggccggcaactgcgtgcacttcgtggccgaggagcaggactgacacgtgctaaaacttcatttttaatttaaaaggatctaggtgaagatcctttttgataatctcatgaccaaaatcccttaacgtgagttttcgttccactgagcgtcagaccccgtagaaaagatcaaaggatcttcttgagatcctttttttctgcgcgtaatctgctgcttgcaaacaaaaaaaccaccgctaccagcggtggtttgtttgccggatcaagagctaccaactctttttccgaaggtaactggcttcagcagagcgcagataccaaatactgtccttctagtgtagccgtagttaggccaccacttcaagaactctgtagcaccgcctacatacctcgctctgctaatcctgttaccagtggctgctgccagtggcgataagtcgtgtcttaccgggttggactcaagacgatagttaccggataaggcgcagcggtcgggctgaacggggggttcgtgcacacagcccagcttggagcgaacgacctacaccgaactgagatacctacagcgtgagctatgagaaagcgccacgcttcccgaagggagaaaggcggacaggtatccggtaagcggcagggtcggaacaggagagcgcacgagggagcttccagggggaaacgcctggtatctttatagtcctgtcgggtttcgccacctctgacttgagcgtcgatttttgtgatgctcgtcaggggggcggagcctatggaaaaacgccagcaacgcggcctttttacggttcctgggcttttgctggccttttgctcacatgttctttcctgcgttatcccctgattctgtggataaccgtattaccgcctttgagtgagctgataccgctcgccgcagccgaacgaccgagcgcagcgagtcagtgagcgaggaagcggaagagcgcccaatacgcaaaccgcctctccccgcgcgttggccgattcattaatgcagctggcacgacaggtttcccgactggaaagcgggcagtgagcgcaacgcaattaatgtgagttagctcactcattaggcaccccaggctttacactttatgcttccggctcgtatgttgtgtggaattgtgagcggataacaatttcacacaggaaacagctatgaccatgattacgccaagctatttaggtgacactatagaatactcaagctatgcatc

SEQ ID NO: 39 - DNA, 5855 bp, Artificial Sequence
  Synthetic DNA vector
aagcttggtgaattcccttatgtgagtgtaaaaggcaggcgagtttgtcccttaattaaggtgcgtttttatgcttgtagtattgtataatgtttttaagatcctagggataacagggtaatgagctcggatccactagtctcacaattccacacaacatacgagccggaagcataaagtgtaaagcctggggtgcctaatgagtgagctaactcacattaggctgaattaggcgcgcctatttctattaattcccgatctagtaacatagatgacaccgcgcgcgataatttatcctagtttgcgcgctatattttgttttctatcgcgtattaaatgtataattgcgggactctaatcataaaaacccatctcataaataacgtcatgcattacatgttaattattacatgcttaacgtaattcaacagaaattatatgataatcatcgcaagaccggcaacaggattcaatcttaagaaactttattgccaaatgtttgaacgatcggggaaattcgggggatcgatcccgcgaactgtggacgagaactgtgccaccaagcgtaaggccgttctctcgcatttgccttgctaggctcgcgcgagttgctggctgaggcgttctcgaaatcagctcttgttcggtcggcatctactctattcctttgccctcggacgagtgctggggcgtcggtttccactatcggcgagtacttctacacagccatcggtccagacggccgcgcttctgcgggcgatttgtgtacgcccgacagtcccggctccggatcggacgattgcgtcgcatcgaccctgcgcccaagctgcatcatcgaaattgccgtcaaccaagctctgatagagttggtcaagaccaatgcggagcatatacgcccggagccgcggcgatcctgcaagctccggatgcctccgctcgaagtagcgcgtctgctgctccatacaagccaaccacggcctccagaagaagatgttggcgacctcgtattgggaatccccgaacatcgcctcgctccagtcaatgaccgctgttatgcggccattgtccgtcaggacattgttggagccgaaatccgcgtgcacgaggtgccggacttcggggcagtcctcggcccaaagcatcagctcatcgagagcctgcgcgacggacgcactgacggtgtcgtccatcacagtttgccagtgatacacatggggatcagcaatcgcgcatatgaaatcacgccatgtagtgtattgaccgattccttgcggtccgaatgggccgaacccgctcgtctggctaagatcggccgcagcgatcgcatccatggcctccgcgaccggctgcagaacagcgggcagttcggtttcaggcaggtcttgcaacgtgacaccctgtgcacggcgggagatgcaataggtcaggctctcgctgaatgccccaatgtcaagcacttccggaatcgggagcgcggccgatgcaaagtgccgataaacataacgatctttgtagaaaccatcggcgcagctatttacccgcaggacatatccacgccctcctacatcgaagctgaaagcacgagattcttcgccctccgagagctgcatcaggtcggagacgctgtcgaacttttcgatcagaaacttctcgacagacgtcgcggtgagttcaggctttttcatatcttattgccccccgggatcagatctggattgagagtgaatatgagactctaattggataccgaggggaatttatggaacgtcagtggagcatttttgacaagaaatatttgctagctgatagtgaccttaggcgacttttgaacgcgcaataatggtttctgacgtatgtgcttagctcattaaactccagaaacccgcggctgagtggctccttcaacgttgcggttctgtcagttccaaacgtaaaacggcttgtcccgcgtcatcggcgggggtcataacgtgactcccttaattctccgctcatgatcttgatcccctgcgccatcagatccttggcggcaagaaagccatccagtttactttgcagggcttcccaaccttaccagagggcgccccagctggcaattccggttcgcttgctgtccataaaaccgcccagtctagctatcgccatgtaagcccactgcaagctacctgctttctctttgcgcttgcgttttcccttgtccagatagcccagtagctgacattcatccggggtcagcaccgtttctgcggactggctttctacgtgttccgcttcctttagcagcccttgcgccctgagtgcttgcggcagcgtgaagctgatccgtcgagattaatagaaataaattcagcctaattcggcgttaattcagtacattaaaaacgtccgcaatgtggcggccgcggtatcactagtattacagaggtaagttataacagtcgcctaacctctagagggcccaattcgccctatagtgagtcgtattacaattcactggccgtcgttttacaacgtcgtgactgggaaaaccctggcgttacccaacttaatcgccttgcagcacatccccctttcgccagctggcgtaatagcgaagaggcccgcaccgatcgcccttcccaacagttgcgcagcctatacgtacggcagtttaaggtttacacctataaaagagagagccgttatcgtctgtttgtggatgtacagagtgatattattgacacgccggggcgacggatggtgatccccctggccagtgcacgtctgctgtcagataaagtctcccgtgaactttacccggtggtgcatatcggggatgaaagctggcgcatgatgaccaccgatatggccagtgtgccggtctccgttatcggggaagaagtggctgatctcagccaccgcgaaaatgacatcaaaaacgccattaacctgatgttctggggaatataaatgtcaggcatgagattatcaaaaaggatcttcacctagatccttttcacgtagaaagccagtccgcagaaacggtgctgaccccggatgaatgtcagctactgggctatctggacaagggaaaacgcaagcgcaaagagaaagcaggtagcttgcagtgggcttacatggcgatagctagactgggcggttttatggacagcaagcgaaccggaattgccagctggggcgccctctggtaaggttgggaagccctgcaaagtaaactggatggctttctcgccgccaaggatctgatggcgcaggggatcaagctctgatcaagagacaggatgaggatcgtttcgcatgattgaacaagatggattgcacgcaggttctccggccgcttgggtggagaggctattcggctatgactgggcacaacagacaatcggctgctctgatgccgccgtgttccggctgtcagcgcaggggcgcccggttctttttgtcaagaccgacctgtccggtgccctgaatgaactgcaagacgaggcagcgcggctatcgtggctggccacgacgggcgttccttgcgcagctgtgctcgacgttgtcactgaagcgggaagggactggctgctattgggcgaagtgccggggcaggatctcctgtcatctcaccttgctcctgccgagaaagtatccatcatggctgatgcaatgcggcggctgcatacgcttgatccggctacctgcccattcgaccaccaagcgaaacatcgcatcgagcgagcacgtactcggatggaagccggtcttgtcgatcaggatgatctggacgaagagcatcaggggctcgcgccagccgaactgttcgccaggctcaaggcgagcatgcccgacggcgaggatctcgtcgtgacccatggcgatgcctgcttgccgaatatcatggtggaaaatggccgcttttctggattcatcgactgtggccggctgggtgtggcggaccgctatcaggacatagcgttggctacccgtgatattgctgaagagcttggcggcgaatgggctgaccgcttcctcgtgctttacggtatcgccgctcccgattcgcagcgcatcgccttctatcgccttcttgacgagttcttctgaattattaacgcttacaatttcctgatgcggtattttctccttacgcatctgtgcggtatttcacaccgcatacaggtggcacttttcggggaaatgtgcgcggaacccctatttgtttatttttctaaatacattcaaatatgtatccgctcatgagacaataaccctgataaatgcttcaataatagcacgtgaggagggccaccatggccaagttgaccagtgccgttccggtgctcaccgcgcgcgacgtcgccggagcggtcgagttctggaccgaccggctcgggttctcccgggacttcgtggaggacgacttcgccggtgtggtccgggacgacgtgaccctgttcatcagcgcggtccaggaccaggtggtgccggacaacaccctggcctgggtgtgggtgcgcggcctggacgagctgtacgccgagtggtcggaggtcgtgtccacgaacttccgggacgcctccgggccggccatgaccgagatcggcgagcagccgtgggggcgggagttcgccctgcgcgacccggccggcaactgcgtgcacttcgtggccgaggagcaggactgacacgtgctaaaacttcatttttaatttaaaaggatctaggtgaagatcctttttgataatctcatgaccaaaatcccttaacgtgagttttcgttccactgagcgtcagaccccgtagaaaagatcaaaggatcttcttgagatcctttttttctgcgcgtaatctgctgcttgcaaacaaaaaaaccaccgctaccagcggtggtttgtttgccggatcaagagctaccaactctttttccgaaggtaactggcttcagcagagcgcagataccaaatactgtccttctagtgtagccgtagttaggccaccacttcaagaactctgtagcaccgcctacatacctcgctctgctaatcctgttaccagtggctgctgccagtggcgataagtcgtgtcttaccgggttggactcaagacgatagttaccggataaggcgcagcggtcgggctgaacggggggttcgtgcacacagcccagcttggagcgaacgacctacaccgaactgagatacctacagcgtgagctatgagaaagcgccacgcttcccgaagggagaaaggcggacaggtatccggtaagcggcagggtcggaacaggagagcgcacgagggagcttccagggggaaacgcctggtatctttatagtcctgtcgggtttcgccacctctgacttgagcgtcgatttttgtgatgctcgtcaggggggcggagcctatggaaaaacgccagcaacgcggcctttttacggttcctgggcttttgctggccttttgctcacatgttctttcctgcgttatcccctgattctgtggataaccgtattaccgcctttgagtgagctgataccgctcgccgcagccgaacgaccgagcgcagcgagtcagtgagcgaggaagcggaagagcgcccaatacgcaaaccgcctctccccgcgcgttggccgattcattaatgcagctggcacgacaggtttcccgactggaaagcgggcagtgagcgcaacgcaattaatgtgagttagctcactcattaggcaccccaggctttacactttatgcttccggctcgtatgttgtgtggaattgtgagcggataacaatttcacacaggaaacagctatgaccatgattacgccaagctatttaggtgacactatagaatactcaagctatgcatc

SEQ ID NO: 40 - DNA, 5855 bp, Artificial Sequence
  Synthetic DNA vector
aagcttggttgcttgcaaaagcagtaattggaaagcactctcaaagaatccttaattaaggtgcgtttttatgcttgtagtattgtataatgtttttaagatcctagggataacagggtaatgagctcggatccactagtctcacaattccacacaacatacgagccggaagcataaagtgtaaagcctggggtgcctaatgagtgagctaactcacattaggctgaattaggcgcgcctatttctattaattcccgatctagtaacatagatgacaccgcgcgcgataatttatcctagtttgcgcgctatattttgttttctatcgcgtattaaatgtataattgcgggactctaatcataaaaacccatctcataaataacgtcatgcattacatgttaattattacatgcttaacgtaattcaacagaaattatatgataatcatcgcaagaccggcaacaggattcaatcttaagaaactttattgccaaatgtttgaacgatcggggaaattcgggggatcgatcccgcgaactgtggacgagaactgtgccaccaagcgtaaggccgttctctcgcatttgccttgctaggctcgcgcgagttgctggctgaggcgttctcgaaatcagctcttgttcggtcggcatctactctattcctttgccctcggacgagtgctggggcgtcggtttccactatcggcgagtacttctacacagccatcggtccagacggccgcgcttctgcgggcgatttgtgtacgcccgacagtcccggctccggatcggacgattgcgtcgcatcgaccctgcgcccaagctgcatcatcgaaattgccgtcaaccaagctctgatagagttggtcaagaccaatgcggagcatatacgcccggagccgcggcgatcctgcaagctccggatgcctccgctcgaagtagcgcgtctgctgctccatacaagccaaccacggcctccagaagaagatgttggcgacctcgtattgggaatccccgaacatcgcctcgctccagtcaatgaccgctgttatgcggccattgtccgtcaggacattgttggagccgaaatccgcgtgcacgaggtgccggacttcggggcagtcctcggcccaaagcatcagctcatcgagagcctgcgcgacggacgcactgacggtgtcgtccatcacagtttgccagtgatacacatggggatcagcaatcgcgcatatgaaatcacgccatgtagtgtattgaccgattccttgcggtccgaatgggccgaacccgctcgtctggctaagatcggccgcagcgatcgcatccatggcctccgcgaccggctgcagaacagcgggcagttcggtttcaggcaggtcttgcaacgtgacaccctgtgcacggcgggagatgcaataggtcaggctctcgctgaatgccccaatgtcaagcacttccggaatcgggagcgcggccgatgcaaagtgccgataaacataacgatctttgtagaaaccatcggcgcagctatttacccgcaggacatatccacgccctcctacatcgaagctgaaagcacgagattcttcgccctccgagagctgcatcaggtcggagacgctgtcgaacttttcgatcagaaacttctcgacagacgtcgcggtgagttcaggctttttcatatcttattgccccccgggatcagatctggattgagagtgaatatgagactctaattggataccgaggggaatttatggaacgtcagtggagcatttttgacaagaaatatttgctagctgatagtgaccttaggcgacttttgaacgcgcaataatggtttctgacgtatgtgcttagctcattaaactccagaaacccgcggctgagtggctccttcaacgttgcggttctgtcagttccaaacgtaaaacggcttgtcccgcgtcatcggcgggggtcataacgtgactcccttaattctccgctcatgatcttgatcccctgcgccatcagatccttggcggcaagaaagccatccagtttactttgcagggcttcccaaccttaccagagggcgccccagctggcaattccggttcgcttgctgtccataaaaccgcccagtctagctatcgccatgtaagcccactgcaagctacctgctttctctttgcgcttgcgttttcccttgtccagatagcccagtagctgacattcatccggggtcagcaccgtttctgcggactggctttctacgtgttccgcttcctttagcagcccttgcgccctgagtgcttgcggcagcgtgaagctgatccgtcgagattaatagaaataaattcagcctaattcggcgttaattcagtacattaaaaacgtccgcaatgtggcggccgcggtatcactagtattacagaggtaagttataacagtcgcctaacctctagagggcccaattcgccctatagtgagtcgtattacaattcactggccgtcgttttacaacgtcgtgactgggaaaaccctggcgttacccaacttaatcgccttgcagcacatccccctttcgccagctggcgtaatagcgaagaggcccgcaccgatcgcccttcccaacagttgcgcagcctatacgtacggcagtttaaggtttacacctataaaagagagagccgttatcgtctgtttgtggatgtacagagtgatattattgacacgccggggcgacggatggtgatccccctggccagtgcacgtctgctgtcagataaagtctcccgtgaactttacccggtggtgcatatcggggatgaaagctggcgcatgatgaccaccgatatggccagtgtgccggtctccgttatcggggaagaagtggctgatctcagccaccgcgaaaatgacatcaaaaacgccattaacctgatgttctggggaatataaatgtcaggcatgagattatcaaaaaggatcttcacctagatccttttcacgtagaaagccagtccgcagaaacggtgctgaccccggatgaatgtcagctactgggctatctggacaagggaaaacgcaagcgcaaagagaaagcaggtagcttgcagtgggcttacatggcgatagctagactgggcggttttatggacagcaagcgaaccggaattgccagctggggcgccctctggtaaggttgggaagccctgcaaagtaaactggatggctttctcgccgccaaggatctgatggcgcaggggatcaagctctgatcaagagacaggatgaggatcgtttcgcatgattgaacaagatggattgcacgcaggttctccggccgcttgggtggagaggctattcggctatgactgggcacaacagacaatcggctgctctgatgccgccgtgttccggctgtcagcgcaggggcgcccggttctttttgtcaagaccgacctgtccggtgccctgaatgaactgcaagacgaggcagcgcggctatcgtggctggccacgacgggcgttccttgcgcagctgtgctcgacgttgtcactgaagcgggaagggactggctgctattgggcgaagtgccggggcaggatctcctgtcatctcaccttgctcctgccgagaaagtatccatcatggctgatgcaatgcggcggctgcatacgcttgatccggctacctgcccattcgaccaccaagcgaaacatcgcatcgagcgagcacgtactcggatggaagccggtcttgtcgatcaggatgatctggacgaagagcatcaggggctcgcgccagccgaactgttcgccaggctcaaggcgagcatgcccgacggcgaggatctcgtcgtgacccatggcgatgcctgcttgccgaatatcatggtggaaaatggccgcttttctggattcatcgactgtggccggctgggtgtggcggaccgctatcaggacatagcgttggctacccgtgatattgctgaagagcttggcggcgaatgggctgaccgcttcctcgtgctttacggtatcgccgctcccgattcgcagcgcatcgccttctatcgccttcttgacgagttcttctgaattattaacgcttacaatttcctgatgcggtattttctccttacgcatctgtgcggtatttcacaccgcatacaggtggcacttttcggggaaatgtgcgcggaacccctatttgtttatttttctaaatacattcaaatatgtatccgctcatgagacaataaccctgataaatgcttcaataatagcacgtgaggagggccaccatggccaagttgaccagtgccgttccggtgctcaccgcgcgcgacgtcgccggagcggtcgagttctggaccgaccggctcgggttctcccgggacttcgtggaggacgacttcgccggtgtggtccgggacgacgtgaccctgttcatcagcgcggtccaggaccaggtggtgccggacaacaccctggcctgggtgtgggtgcgcggcctggacgagctgtacgccgagtggtcggaggtcgtgtccacgaacttccgggacgcctccgggccggccatgaccgagatcggcgagcagccgtgggggcgggagttcgccctgcgcgacccggccggcaactgcgtgcacttcgtggccgaggagcaggactgacacgtgctaaaacttcatttttaatttaaaaggatctaggtgaagatcctttttgataatctcatgaccaaaatcccttaacgtgagttttcgttccactgagcgtcagaccccgtagaaaagatcaaaggatcttcttgagatcctttttttctgcgcgtaatctgctgcttgcaaacaaaaaaaccaccgctaccagcggtggtttgtttgccggatcaagagctaccaactctttttccgaaggtaactggcttcagcagagcgcagataccaaatactgtccttctagtgtagccgtagttaggccaccacttcaagaactctgtagcaccgcctacatacctcgctctgctaatcctgttaccagtggctgctgccagtggcgataagtcgtgtcttaccgggttggactcaagacgatagttaccggataaggcgcagcggtcgggctgaacggggggttcgtgcacacagcccagcttggagcgaacgacctacaccgaactgagatacctacagcgtgagctatgagaaagcgccacgcttcccgaagggagaaaggcggacaggtatccggtaagcggcagggtcggaacaggagagcgcacgagggagcttccagggggaaacgcctggtatctttatagtcctgtcgggtttcgccacctctgacttgagcgtcgatttttgtgatgctcgtcaggggggcggagcctatggaaaaacgccagcaacgcggcctttttacggttcctgggcttttgctggccttttgctcacatgttctttcctgcgttatcccctgattctgtggataaccgtattaccgcctttgagtgagctgataccgctcgccgcagccgaacgaccgagcgcagcgagtcagtgagcgaggaagcggaagagcgcccaatacgcaaaccgcctctccccgcgcgttggccgattcattaatgcagctggcacgacaggtttcccgactggaaagcgggcagtgagcgcaacgcaattaatgtgagttagctcactcattaggcaccccaggctttacactttatgcttccggctcgtatgttgtgtggaattgtgagcggataacaatttcacacaggaaacagctatgaccatgattacgccaagctatttaggtgacactatagaatactcaagctatgcatc

SEQ ID NO: 41 - DNA, 5855 bp, Artificial Sequence
  Synthetic DNA vector
aagcttggtagataagttgatttagccataaaatattgtttccgtgaccccttaattaaggtgcgtttttatgcttgtagtattgtataatgtttttaagatcctagggataacagggtaatgagctcggatccactagtctcacaattccacacaacatacgagccggaagcataaagtgtaaagcctggggtgcctaatgagtgagctaactcacattaggctgaattaggcgcgcctatttctattaattcccgatctagtaacatagatgacaccgcgcgcgataatttatcctagtttgcgcgctatattttgttttctatcgcgtattaaatgtataattgcgggactctaatcataaaaacccatctcataaataacgtcatgcattacatgttaattattacatgcttaacgtaattcaacagaaattatatgataatcatcgcaagaccggcaacaggattcaatcttaagaaactttattgccaaatgtttgaacgatcggggaaattcgggggatcgatcccgcgaactgtggacgagaactgtgccaccaagcgtaaggccgttctctcgcatttgccttgctaggctcgcgcgagttgctggctgaggcgttctcgaaatcagctcttgttcggtcggcatctactctattcctttgccctcggacgagtgctggggcgtcggtttccactatcggcgagtacttctacacagccatcggtccagacggccgcgcttctgcgggcgatttgtgtacgcccgacagtcccggctccggatcggacgattgcgtcgcatcgaccctgcgcccaagctgcatcatcgaaattgccgtcaaccaagctctgatagagttggtcaagaccaatgcggagcatatacgcccggagccgcggcgatcctgcaagctccggatgcctccgctcgaagtagcgcgtctgctgctccatacaagccaaccacggcctccagaagaagatgttggcgacctcgtattgggaatccccgaacatcgcctcgctccagtcaatgaccgctgttatgcggccattgtccgtcaggacattgttggagccgaaatccgcgtgcacgaggtgccggacttcggggcagtcctcggcccaaagcatcagctcatcgagagcctgcgcgacggacgcactgacggtgtcgtccatcacagtttgccagtgatacacatggggatcagcaatcgcgcatatgaaatcacgccatgtagtgtattgaccgattccttgcggtccgaatgggccgaacccgctcgtctggctaagatcggccgcagcgatcgcatccatggcctccgcgaccggctgcagaacagcgggcagttcggtttcaggcaggtcttgcaacgtgacaccctgtgcacggcgggagatgcaataggtcaggctctcgctgaatgccccaatgtcaagcacttccggaatcgggagcgcggccgatgcaaagtgccgataaacataacgatctttgtagaaaccatcggcgcagctatttacccgcaggacatatccacgccctcctacatcgaagctgaaagcacgagattcttcgccctccgagagctgcatcaggtcggagacgctgtcgaacttttcgatcagaaacttctcgacagacgtcgcggtgagttcaggctttttcatatcttattgccccccgggatcagatctggattgagagtgaatatgagactctaattggataccgaggggaatttatggaacgtcagtggagcatttttgacaagaaatatttgctagctgatagtgaccttaggcgacttttgaacgcgcaataatggtttctgacgtatgtgcttagctcattaaactccagaaacccgcggctgagtggctccttcaacgttgcggttctgtcagttccaaacgtaaaacggcttgtcccgcgtcatcggcgggggtcataacgtgactcccttaattctccgctcatgatcttgatcccctgcgccatcagatccttggcggcaagaaagccatccagtttactttgcagggcttcccaaccttaccagagggcgccccagctggcaattccggttcgcttgctgtccataaaaccgcccagtctagctatcgccatgtaagcccactgcaagctacctgctttctctttgcgcttgcgttttcccttgtccagatagcccagtagctgacattcatccggggtcagcaccgtttctgcggactggctttctacgtgttccgcttcctttagcagcccttgcgccctgagtgcttgcggcagcgtgaagctgatccgtcgagattaatagaaataaattcagcctaattcggcgttaattcagtacattaaaaacgtccgcaatgtggcggccgcggtatcactagtattacagaggtaagttataacagtcgcctaacctctagagggcccaattcgccctatagtgagtcgtattacaattcactggccgtcgttttacaacgtcgtgactgggaaaaccctggcgttacccaacttaatcgccttgcagcacatccccctttcgccagctggcgtaatagcgaagaggcccgcaccgatcgcccttcccaacagttgcgcagcctatacgtacggcagtttaaggtttacacctataaaagagagagccgttatcgtctgtttgtggatgtacagagtgatattattgacacgccggggcgacggatggtgatccccctggccagtgcacgtctgctgtcagataaagtctcccgtgaactttacccggtggtgcatatcggggatgaaagctggcgcatgatgaccaccgatatggccagtgtgccggtctccgttatcggggaagaagtggctgatctcagccaccgcgaaaatgacatcaaaaacgccattaacctgatgttctggggaatataaatgtcaggcatgagattatcaaaaaggatcttcacctagatccttttcacgtagaaagccagtccgcagaaacggtgctgaccccggatgaatgtcagctactgggctatctggacaagggaaaacgcaagcgcaaagagaaagcaggtagcttgcagtgggcttacatggcgatagctagactgggcggttttatggacagcaagcgaaccggaattgccagctggggcgccctctggtaaggttgggaagccctgcaaagtaaactggatggctttctcgccgccaaggatctgatggcgcaggggatcaagctctgatcaagagacaggatgaggatcgtttcgcatgattgaacaagatggattgcacgcaggttctccggccgcttgggtggagaggctattcggctatgactgggcacaacagacaatcggctgctctgatgccgccgtgttccggctgtcagcgcaggggcgcccggttctttttgtcaagaccgacctgtccggtgccctgaatgaactgcaagacgaggcagcgcggctatcgtggctggccacgacgggcgttccttgcgcagctgtgctcgacgttgtcactgaagcgggaagggactggctgctattgggcgaagtgccggggcaggatctcctgtcatctcaccttgctcctgccgagaaagtatccatcatggctgatgcaatgcggcggctgcatacgcttgatccggctacctgcccattcgaccaccaagcgaaacatcgcatcgagcgagcacgtactcggatggaagccggtcttgtcgatcaggatgatctggacgaagagcatcaggggctcgcgccagccgaactgttcgccaggctcaaggcgagcatgcccgacggcgaggatctcgtcgtgacccatggcgatgcctgcttgccgaatatcatggtggaaaatggccgcttttctggattcatcgactgtggccggctgggtgtggcggaccgctatcaggacatagcgttggctacccgtgatattgctgaagagcttggcggcgaatgggctgaccgcttcctcgtgctttacggtatcgccgctcccgattcgcagcgcatcgccttctatcgccttcttgacgagttcttctgaattattaacgcttacaatttcctgatgcggtattttctccttacgcatctgtgcggtatttcacaccgcatacaggtggcacttttcggggaaatgtgcgcggaacccctatttgtttatttttctaaatacattcaaatatgtatccgctcatgagacaataaccctgataaatgcttcaataatagcacgtgaggagggccaccatggccaagttgaccagtgccgttccggtgctcaccgcgcgcgacgtcgccggagcggtcgagttctggaccgaccggctcgggttctcccgggacttcgtggaggacgacttcgccggtgtggtccgggacgacgtgaccctgttcatcagcgcggtccaggaccaggtggtgccggacaacaccctggcctgggtgtgggtgcgcggcctggacgagctgtacgccgagtggtcggaggtcgtgtccacgaacttccgggacgcctccgggccggccatgaccgagatcggcgagcagccgtgggggcgggagttcgccctgcgcgacccggccggcaactgcgtgcacttcgtggccgaggagcaggactgacacgtgctaaaacttcatttttaatttaaaaggatctaggtgaagatcctttttgataatctcatgaccaaaatcccttaacgtgagttttcgttccactgagcgtcagaccccgtagaaaagatcaaaggatcttcttgagatcctttttttctgcgcgtaatctgctgcttgcaaacaaaaaaaccaccgctaccagcggtggtttgtttgccggatcaagagctaccaactctttttccgaaggtaactggcttcagcagagcgcagataccaaatactgtccttctagtgtagccgtagttaggccaccacttcaagaactctgtagcaccgcctacatacctcgctctgctaatcctgttaccagtggctgctgccagtggcgataagtcgtgtcttaccgggttggactcaagacgatagttaccggataaggcgcagcggtcgggctgaacggggggttcgtgcacacagcccagcttggagcgaacgacctacaccgaactgagatacctacagcgtgagctatgagaaagcgccacgcttcccgaagggagaaaggcggacaggtatccggtaagcggcagggtcggaacaggagagcgcacgagggagcttccagggggaaacgcctggtatctttatagtcctgtcgggtttcgccacctctgacttgagcgtcgatttttgtgatgctcgtcaggggggcggagcctatggaaaaacgccagcaacgcggcctttttacggttcctgggcttttgctggccttttgctcacatgttctttcctgcgttatcccctgattctgtggataaccgtattaccgcctttgagtgagctgataccgctcgccgcagccgaacgaccgagcgcagcgagtcagtgagcgaggaagcggaagagcgcccaatacgcaaaccgcctctccccgcgcgttggccgattcattaatgcagctggcacgacaggtttcccgactggaaagcgggcagtgagcgcaacgcaattaatgtgagttagctcactcattaggcaccccaggctttacactttatgcttccggctcgtatgttgtgtggaattgtgagcggataacaatttcacacaggaaacagctatgaccatgattacgccaagctatttaggtgacactatagaatactcaagctatgcatc

SEQ ID NO: 42 - DNA, 5855 bp, Artificial Sequence
  Synthetic DNA vector
aagcttggttctgagtcacggcttcattggcattccgtacaacgaacgtccttaattaaggtgcgtttttatgcttgtagtattgtataatgtttttaagatcctagggataacagggtaatgagctcggatccactagtctcacaattccacacaacatacgagccggaagcataaagtgtaaagcctggggtgcctaatgagtgagctaactcacattaggctgaattaggcgcgcctatttctattaattcccgatctagtaacatagatgacaccgcgcgcgataatttatcctagtttgcgcgctatattttgttttctatcgcgtattaaatgtataattgcgggactctaatcataaaaacccatctcataaataacgtcatgcattacatgttaattattacatgcttaacgtaattcaacagaaattatatgataatcatcgcaagaccggcaacaggattcaatcttaagaaactttattgccaaatgtttgaacgatcggggaaattcgggggatcgatcccgcgaactgtggacgagaactgtgccaccaagcgtaaggccgttctctcgcatttgccttgctaggctcgcgcgagttgctggctgaggcgttctcgaaatcagctcttgttcggtcggcatctactctattcctttgccctcggacgagtgctggggcgtcggtttccactatcggcgagtacttctacacagccatcggtccagacggccgcgcttctgcgggcgatttgtgtacgcccgacagtcccggctccggatcggacgattgcgtcgcatcgaccctgcgcccaagctgcatcatcgaaattgccgtcaaccaagctctgatagagttggtcaagaccaatgcggagcatatacgcccggagccgcggcgatcctgcaagctccggatgcctccgctcgaagtagcgcgtctgctgctccatacaagccaaccacggcctccagaagaagatgttggcgacctcgtattgggaatccccgaacatcgcctcgctccagtcaatgaccgctgttatgcggccattgtccgtcaggacattgttggagccgaaatccgcgtgcacgaggtgccggacttcggggcagtcctcggcccaaagcatcagctcatcgagagcctgcgcgacggacgcactgacggtgtcgtccatcacagtttgccagtgatacacatggggatcagcaatcgcgcatatgaaatcacgccatgtagtgtattgaccgattccttgcggtccgaatgggccgaacccgctcgtctggctaagatcggccgcagcgatcgcatccatggcctccgcgaccggctgcagaacagcgggcagttcggtttcaggcaggtcttgcaacgtgacaccctgtgcacggcgggagatgcaataggtcaggctctcgctgaatgccccaatgtcaagcacttccggaatcgggagcgcggccgatgcaaagtgccgataaacataacgatctttgtagaaaccatcggcgcagctatttacccgcaggacatatccacgccctcctacatcgaagctgaaagcacgagattcttcgccctccgagagctgcatcaggtcggagacgctgtcgaacttttcgatcagaaacttctcgacagacgtcgcggtgagttcaggctttttcatatcttattgccccccgggatcagatctggattgagagtgaatatgagactctaattggataccgaggggaatttatggaacgtcagtggagcatttttgacaagaaatatttgctagctgatagtgaccttaggcgacttttgaacgcgcaataatggtttctgacgtatgtgcttagctcattaaactccagaaacccgcggctgagtggctccttcaacgttgcggttctgtcagttccaaacgtaaaacggcttgtcccgcgtcatcggcgggggtcataacgtgactcccttaattctccgctcatgatcttgatcccctgcgccatcagatccttggcggcaagaaagccatccagtttactttgcagggcttcccaaccttaccagagggcgccccagctggcaattccggttcgcttgctgtccataaaaccgcccagtctagctatcgccatgtaagcccactgcaagctacctgctttctctttgcgcttgcgttttcccttgtccagatagcccagtagctgacattcatccggggtcagcaccgtttctgcggactggctttctacgtgttccgcttcctttagcagcccttgcgccctgagtgcttgcggcagcgtgaagctgatccgtcgagattaatagaaataaattcagcctaattcggcgttaattcagtacattaaaaacgtccgcaatgtggcggccgcggtatcactagtattacagaggtaagttataacagtcgcctaacctctagagggcccaattcgccctatagtgagtcgtattacaattcactggccgtcgttttacaacgtcgtgactgggaaaaccctggcgttacccaacttaatcgccttgcagcacatccccctttcgccagctggcgtaatagcgaagaggcccgcaccgatcgcccttcccaacagttgcgcagcctatacgtacggcagtttaaggtttacacctataaaagagagagccgttatcgtctgtttgtggatgtacagagtgatattattgacacgccggggcgacggatggtgatccccctggccagtgcacgtctgctgtcagataaagtctcccgtgaactttacccggtggtgcatatcggggatgaaagctggcgcatgatgaccaccgatatggccagtgtgccggtctccgttatcggggaagaagtggctgatctcagccaccgcgaaaatgacatcaaaaacgccattaacctgatgttctggggaatataaatgtcaggcatgagattatcaaaaaggatcttcacctagatccttttcacgtagaaagccagtccgcagaaacggtgctgaccccggatgaatgtcagctactgggctatctggacaagggaaaacgcaagcgcaaagagaaagcaggtagcttgcagtgggcttacatggcgatagctagactgggcggttttatggacagcaagcgaaccggaattgccagctggggcgccctctggtaaggttgggaagccctgcaaagtaaactggatggctttctcgccgccaaggatctgatggcgcaggggatcaagctctgatcaagagacaggatgaggatcgtttcgcatgattgaacaagatggattgcacgcaggttctccggccgcttgggtggagaggctattcggctatgactgggcacaacagacaatcggctgctctgatgccgccgtgttccggctgtcagcgcaggggcgcccggttctttttgtcaagaccgacctgtccggtgccctgaatgaactgcaagacgaggcagcgcggctatcgtggctggccacgacgggcgttccttgcgcagctgtgctcgacgttgtcactgaagcgggaagggactggctgctattgggcgaagtgccggggcaggatctcctgtcatctcaccttgctcctgccgagaaagtatccatcatggctgatgcaatgcggcggctgcatacgcttgatccggctacctgcccattcgaccaccaagcgaaacatcgcatcgagcgagcacgtactcggatggaagccggtcttgtcgatcaggatgatctggacgaagagcatcaggggctcgcgccagccgaactgttcgccaggctcaaggcgagcatgcccgacggcgaggatctcgtcgtgacccatggcgatgcctgcttgccgaatatcatggtggaaaatggccgcttttctggattcatcgactgtggccggctgggtgtggcggaccgctatcaggacatagcgttggctacccgtgatattgctgaagagcttggcggcgaatgggctgaccgcttcctcgtgctttacggtatcgccgctcccgattcgcagcgcatcgccttctatcgccttcttgacgagttcttctgaattattaacgcttacaatttcctgatgcggtattttctccttacgcatctgtgcggtatttcacaccgcatacaggtggcacttttcggggaaatgtgcgcggaacccctatttgtttatttttctaaatacattcaaatatgtatccgctcatgagacaataaccctgataaatgcttcaataatagcacgtgaggagggccaccatggccaagttgaccagtgccgttccggtgctcaccgcgcgcgacgtcgccggagcggtcgagttctggaccgaccggctcgggttctcccgggacttcgtggaggacgacttcgccggtgtggtccgggacgacgtgaccctgttcatcagcgcggtccaggaccaggtggtgccggacaacaccctggcctgggtgtgggtgcgcggcctggacgagctgtacgccgagtggtcggaggtcgtgtccacgaacttccgggacgcctccgggccggccatgaccgagatcggcgagcagccgtgggggcgggagttcgccctgcgcgacccggccggcaactgcgtgcacttcgtggccgaggagcaggactgacacgtgctaaaacttcatttttaatttaaaaggatctaggtgaagatcctttttgataatctcatgaccaaaatcccttaacgtgagttttcgttccactgagcgtcagaccccgtagaaaagatcaaaggatcttcttgagatcctttttttctgcgcgtaatctgctgcttgcaaacaaaaaaaccaccgctaccagcggtggtttgtttgccggatcaagagctaccaactctttttccgaaggtaactggcttcagcagagcgcagataccaaatactgtccttctagtgtagccgtagttaggccaccacttcaagaactctgtagcaccgcctacatacctcgctctgctaatcctgttaccagtggctgctgccagtggcgataagtcgtgtcttaccgggttggactcaagacgatagttaccggataaggcgcagcggtcgggctgaacggggggttcgtgcacacagcccagcttggagcgaacgacctacaccgaactgagatacctacagcgtgagctatgagaaagcgccacgcttcccgaagggagaaaggcggacaggtatccggtaagcggcagggtcggaacaggagagcgcacgagggagcttccagggggaaacgcctggtatctttatagtcctgtcgggtttcgccacctctgacttgagcgtcgatttttgtgatgctcgtcaggggggcggagcctatggaaaaacgccagcaacgcggcctttttacggttcctgggcttttgctggccttttgctcacatgttctttcctgcgttatcccctgattctgtggataaccgtattaccgcctttgagtgagctgataccgctcgccgcagccgaacgaccgagcgcagcgagtcagtgagcgaggaagcggaagagcgcccaatacgcaaaccgcctctccccgcgcgttggccgattcattaatgcagctggcacgacaggtttcccgactggaaagcgggcagtgagcgcaacgcaattaatgtgagttagctcactcattaggcaccccaggctttacactttatgcttccggctcgtatgttgtgtggaattgtgagcggataacaatttcacacaggaaacagctatgaccatgattacgccaagctatttaggtgacactatagaatactcaagctatgcatc

SEQ ID NO: 43 - DNA, 5855 bp, Artificial Sequence
  Synthetic DNA vector
aagcttggtcctcagagagcctatagcggtaaaacaacaccatgcatccccttaattaaggtgcgtttttatgcttgtagtattgtataatgtttttaagatcctagggataacagggtaatgagctcggatccactagtctcacaattccacacaacatacgagccggaagcataaagtgtaaagcctggggtgcctaatgagtgagctaactcacattaggctgaattaggcgcgcctatttctattaattcccgatctagtaacatagatgacaccgcgcgcgataatttatcctagtttgcgcgctatattttgttttctatcgcgtattaaatgtataattgcgggactctaatcataaaaacccatctcataaataacgtcatgcattacatgttaattattacatgcttaacgtaattcaacagaaattatatgataatcatcgcaagaccggcaacaggattcaatcttaagaaactttattgccaaatgtttgaacgatcggggaaattcgggggatcgatcccgcgaactgtggacgagaactgtgccaccaagcgtaaggccgttctctcgcatttgccttgctaggctcgcgcgagttgctggctgaggcgttctcgaaatcagctcttgttcggtcggcatctactctattcctttgccctcggacgagtgctggggcgtcggtttccactatcggcgagtacttctacacagccatcggtccagacggccgcgcttctgcgggcgatttgtgtacgcccgacagtcccggctccggatcggacgattgcgtcgcatcgaccctgcgcccaagctgcatcatcgaaattgccgtcaaccaagctctgatagagttggtcaagaccaatgcggagcatatacgcccggagccgcggcgatcctgcaagctccggatgcctccgctcgaagtagcgcgtctgctgctccatacaagccaaccacggcctccagaagaagatgttggcgacctcgtattgggaatccccgaacatcgcctcgctccagtcaatgaccgctgttatgcggccattgtccgtcaggacattgttggagccgaaatccgcgtgcacgaggtgccggacttcggggcagtcctcggcccaaagcatcagctcatcgagagcctgcgcgacggacgcactgacggtgtcgtccatcacagtttgccagtgatacacatggggatcagcaatcgcgcatatgaaatcacgccatgtagtgtattgaccgattccttgcggtccgaatgggccgaacccgctcgtctggctaagatcggccgcagcgatcgcatccatggcctccgcgaccggctgcagaacagcgggcagttcggtttcaggcaggtcttgcaacgtgacaccctgtgcacggcgggagatgcaataggtcaggctctcgctgaatgccccaatgtcaagcacttccggaatcgggagcgcggccgatgcaaagtgccgataaacataacgatctttgtagaaaccatcggcgcagctatttacccgcaggacatatccacgccctcctacatcgaagctgaaagcacgagattcttcgccctccgagagctgcatcaggtcggagacgctgtcgaacttttcgatcagaaacttctcgacagacgtcgcggtgagttcaggctttttcatatcttattgccccccgggatcagatctggattgagagtgaatatgagactctaattggataccgaggggaatttatggaacgtcagtggagcatttttgacaagaaatatttgctagctgatagtgaccttaggcgacttttgaacgcgcaataatggtttctgacgtatgtgcttagctcattaaactccagaaacccgcggctgagtggctccttcaacgttgcggttctgtcagttccaaacgtaaaacggcttgtcccgcgtcatcggcgggggtcataacgtgactcccttaattctccgctcatgatcttgatcccctgcgccatcagatccttggcggcaagaaagccatccagtttactttgcagggcttcccaaccttaccagagggcgccccagctggcaattccggttcgcttgctgtccataaaaccgcccagtctagctatcgccatgtaagcccactgcaagctacctgctttctctttgcgcttgcgttttcccttgtccagatagcccagtagctgacattcatccggggtcagcaccgtttctgcggactggctttctacgtgttccgcttcctttagcagcccttgcgccctgagtgcttgcggcagcgtgaagctgatccgtcgagattaatagaaataaattcagcctaattcggcgttaattcagtacattaaaaacgtccgcaatgtggcggccgcggtatcactagtattacagaggtaagttataacagtcgcctaacctctagagggcccaattcgccctatagtgagtcgtattacaattcactggccgtcgttttacaacgtcgtgactgggaaaaccctggcgttacccaacttaatcgccttgcagcacatccccctttcgccagctggcgtaatagcgaagaggcccgcaccgatcgcccttcccaacagttgcgcagcctatacgtacggcagtttaaggtttacacctataaaagagagagccgttatcgtctgtttgtggatgtacagagtgatattattgacacgccggggcgacggatggtgatccccctggccagtgcacgtctgctgtcagataaagtctcccgtgaactttacccggtggtgcatatcggggatgaaagctggcgcatgatgaccaccgatatggccagtgtgccggtctccgttatcggggaagaagtggctgatctcagccaccgcgaaaatgacatcaaaaacgccattaacctgatgttctggggaatataaatgtcaggcatgagattatcaaaaaggatcttcacctagatccttttcacgtagaaagccagtccgcagaaacggtgctgaccccggatgaatgtcagctactgggctatctggacaagggaaaacgcaagcgcaaagagaaagcaggtagcttgcagtgggcttacatggcgatagctagactgggcggttttatggacagcaagcgaaccggaattgccagctggggcgccctctggtaaggttgggaagccctgcaaagtaaactggatggctttctcgccgccaaggatctgatggcgcaggggatcaagctctgatcaagagacaggatgaggatcgtttcgcatgattgaacaagatggattgcacgcaggttctccggccgcttgggtggagaggctattcggctatgactgggcacaacagacaatcggctgctctgatgccgccgtgttccggctgtcagcgcaggggcgcccggttctttttgtcaagaccgacctgtccggtgccctgaatgaactgcaagacgaggcagcgcggctatcgtggctggccacgacgggcgttccttgcgcagctgtgctcgacgttgtcactgaagcgggaagggactggctgctattgggcgaagtgccggggcaggatctcctgtcatctcaccttgctcctgccgagaaagtatccatcatggctgatgcaatgcggcggctgcatacgcttgatccggctacctgcccattcgaccaccaagcgaaacatcgcatcgagcgagcacgtactcggatggaagccggtcttgtcgatcaggatgatctggacgaagagcatcaggggctcgcgccagccgaactgttcgccaggctcaaggcgagcatgcccgacggcgaggatctcgtcgtgacccatggcgatgcctgcttgccgaatatcatggtggaaaatggccgcttttctggattcatcgactgtggccggctgggtgtggcggaccgctatcaggacatagcgttggctacccgtgatattgctgaagagcttggcggcgaatgggctgaccgcttcctcgtgctttacggtatcgccgctcccgattcgcagcgcatcgccttctatcgccttcttgacgagttcttctgaattattaacgcttacaatttcctgatgcggtattttctccttacgcatctgtgcggtatttcacaccgcatacaggtggcacttttcggggaaatgtgcgcggaacccctatttgtttatttttctaaatacattcaaatatgtatccgctcatgagacaataaccctgataaatgcttcaataatagcacgtgaggagggccaccatggccaagttgaccagtgccgttccggtgctcaccgcgcgcgacgtcgccggagcggtcgagttctggaccgaccggctcgggttctcccgggacttcgtggaggacgacttcgccggtgtggtccgggacgacgtgaccctgttcatcagcgcggtccaggaccaggtggtgccggacaacaccctggcctgggtgtgggtgcgcggcctggacgagctgtacgccgagtggtcggaggtcgtgtccacgaacttccgggacgcctccgggccggccatgaccgagatcggcgagcagccgtgggggcgggagttcgccctgcgcgacccggccggcaactgcgtgcacttcgtggccgaggagcaggactgacacgtgctaaaacttcatttttaatttaaaaggatctaggtgaagatcctttttgataatctcatgaccaaaatcccttaacgtgagttttcgttccactgagcgtcagaccccgtagaaaagatcaaaggatcttcttgagatcctttttttctgcgcgtaatctgctgcttgcaaacaaaaaaaccaccgctaccagcggtggtttgtttgccggatcaagagctaccaactctttttccgaaggtaactggcttcagcagagcgcagataccaaatactgtccttctagtgtagccgtagttaggccaccacttcaagaactctgtagcaccgcctacatacctcgctctgctaatcctgttaccagtggctgctgccagtggcgataagtcgtgtcttaccgggttggactcaagacgatagttaccggataaggcgcagcggtcgggctgaacggggggttcgtgcacacagcccagcttggagcgaacgacctacaccgaactgagatacctacagcgtgagctatgagaaagcgccacgcttcccgaagggagaaaggcggacaggtatccggtaagcggcagggtcggaacaggagagcgcacgagggagcttccagggggaaacgcctggtatctttatagtcctgtcgggtttcgccacctctgacttgagcgtcgatttttgtgatgctcgtcaggggggcggagcctatggaaaaacgccagcaacgcggcctttttacggttcctgggcttttgctggccttttgctcacatgttctttcctgcgttatcccctgattctgtggataaccgtattaccgcctttgagtgagctgataccgctcgccgcagccgaacgaccgagcgcagcgagtcagtgagcgaggaagcggaagagcgcccaatacgcaaaccgcctctccccgcgcgttggccgattcattaatgcagctggcacgacaggtttcccgactggaaagcgggcagtgagcgcaacgcaattaatgtgagttagctcactcattaggcaccccaggctttacactttatgcttccggctcgtatgttgtgtggaattgtgagcggataacaatttcacacaggaaacagctatgaccatgattacgccaagctatttaggtgacactatagaatactcaagctatgcatc

SEQ ID NO: 44 - DNA, 5855 bp, Artificial Sequence
  Synthetic DNA vector
aagcttggtcgcagtcgcttcctgtaaatagagcattaaattccatagtccttaattaaggtgcgtttttatgcttgtagtattgtataatgtttttaagatcctagggataacagggtaatgagctcggatccactagtctcacaattccacacaacatacgagccggaagcataaagtgtaaagcctggggtgcctaatgagtgagctaactcacattaggctgaattaggcgcgcctatttctattaattcccgatctagtaacatagatgacaccgcgcgcgataatttatcctagtttgcgcgctatattttgttttctatcgcgtattaaatgtataattgcgggactctaatcataaaaacccatctcataaataacgtcatgcattacatgttaattattacatgcttaacgtaattcaacagaaattatatgataatcatcgcaagaccggcaacaggattcaatcttaagaaactttattgccaaatgtttgaacgatcggggaaattcgggggatcgatcccgcgaactgtggacgagaactgtgccaccaagcgtaaggccgttctctcgcatttgccttgctaggctcgcgcgagttgctggctgaggcgttctcgaaatcagctcttgttcggtcggcatctactctattcctttgccctcggacgagtgctggggcgtcggtttccactatcggcgagtacttctacacagccatcggtccagacggccgcgcttctgcgggcgatttgtgtacgcccgacagtcccggctccggatcggacgattgcgtcgcatcgaccctgcgcccaagctgcatcatcgaaattgccgtcaaccaagctctgatagagttggtcaagaccaatgcggagcatatacgcccggagccgcggcgatcctgcaagctccggatgcctccgctcgaagtagcgcgtctgctgctccatacaagccaaccacggcctccagaagaagatgttggcgacctcgtattgggaatccccgaacatcgcctcgctccagtcaatgaccgctgttatgcggccattgtccgtcaggacattgttggagccgaaatccgcgtgcacgaggtgccggacttcggggcagtcctcggcccaaagcatcagctcatcgagagcctgcgcgacggacgcactgacggtgtcgtccatcacagtttgccagtgatacacatggggatcagcaatcgcgcatatgaaatcacgccatgtagtgtattgaccgattccttgcggtccgaatgggccgaacccgctcgtctggctaagatcggccgcagcgatcgcatccatggcctccgcgaccggctgcagaacagcgggcagttcggtttcaggcaggtcttgcaacgtgacaccctgtgcacggcgggagatgcaataggtcaggctctcgctgaatgccccaatgtcaagcacttccggaatcgggagcgcggccgatgcaaagtgccgataaacataacgatctttgtagaaaccatcggcgcagctatttacccgcaggacatatccacgccctcctacatcgaagctgaaagcacgagattcttcgccctccgagagctgcatcaggtcggagacgctgtcgaacttttcgatcagaaacttctcgacagacgtcgcggtgagttcaggctttttcatatcttattgccccccgggatcagatctggattgagagtgaatatgagactctaattggataccgaggggaatttatggaacgtcagtggagcatttttgacaagaaatatttgctagctgatagtgaccttaggcgacttttgaacgcgcaataatggtttctgacgtatgtgcttagctcattaaactccagaaacccgcggctgagtggctccttcaacgttgcggttctgtcagttccaaacgtaaaacggcttgtcccgcgtcatcggcgggggtcataacgtgactcccttaattctccgctcatgatcttgatcccctgcgccatcagatccttggcggcaagaaagccatccagtttactttgcagggcttcccaaccttaccagagggcgccccagctggcaattccggttcgcttgctgtccataaaaccgcccagtctagctatcgccatgtaagcccactgcaagctacctgctttctctttgcgcttgcgttttcccttgtccagatagcccagtagctgacattcatccggggtcagcaccgtttctgcggactggctttctacgtgttccgcttcctttagcagcccttgcgccctgagtgcttgcggcagcgtgaagctgatccgtcgagattaatagaaataaattcagcctaattcggcgttaattcagtacattaaaaacgtccgcaatgtggcggccgcggtatcactagtattacagaggtaagttataacagtcgcctaacctctagagggcccaattcgccctatagtgagtcgtattacaattcactggccgtcgttttacaacgtcgtgactgggaaaaccctggcgttacccaacttaatcgccttgcagcacatccccctttcgccagctggcgtaatagcgaagaggcccgcaccgatcgcccttcccaacagttgcgcagcctatacgtacggcagtttaaggtttacacctataaaagagagagccgttatcgtctgtttgtggatgtacagagtgatattattgacacgccggggcgacggatggtgatccccctggccagtgcacgtctgctgtcagataaagtctcccgtgaactttacccggtggtgcatatcggggatgaaagctggcgcatgatgaccaccgatatggccagtgtgccggtctccgttatcggggaagaagtggctgatctcagccaccgcgaaaatgacatcaaaaacgccattaacctgatgttctggggaatataaatgtcaggcatgagattatcaaaaaggatcttcacctagatccttttcacgtagaaagccagtccgcagaaacggtgctgaccccggatgaatgtcagctactgggctatctggacaagggaaaacgcaagcgcaaagagaaagcaggtagcttgcagtgggcttacatggcgatagctagactgggcggttttatggacagcaagcgaaccggaattgccagctggggcgccctctggtaaggttgggaagccctgcaaagtaaactggatggctttctcgccgccaaggatctgatggcgcaggggatcaagctctgatcaagagacaggatgaggatcgtttcgcatgattgaacaagatggattgcacgcaggttctccggccgcttgggtggagaggctattcggctatgactgggcacaacagacaatcggctgctctgatgccgccgtgttccggctgtcagcgcaggggcgcccggttctttttgtcaagaccgacctgtccggtgccctgaatgaactgcaagacgaggcagcgcggctatcgtggctggccacgacgggcgttccttgcgcagctgtgctcgacgttgtcactgaagcgggaagggactggctgctattgggcgaagtgccggggcaggatctcctgtcatctcaccttgctcctgccgagaaagtatccatcatggctgatgcaatgcggcggctgcatacgcttgatccggctacctgcccattcgaccaccaagcgaaacatcgcatcgagcgagcacgtactcggatggaagccggtcttgtcgatcaggatgatctggacgaagagcatcaggggctcgcgccagccgaactgttcgccaggctcaaggcgagcatgcccgacggcgaggatctcgtcgtgacccatggcgatgcctgcttgccgaatatcatggtggaaaatggccgcttttctggattcatcgactgtggccggctgggtgtggcggaccgctatcaggacatagcgttggctacccgtgatattgctgaagagcttggcggcgaatgggctgaccgcttcctcgtgctttacggtatcgccgctcccgattcgcagcgcatcgccttctatcgccttcttgacgagttcttctgaattattaacgcttacaatttcctgatgcggtattttctccttacgcatctgtgcggtatttcacaccgcatacaggtggcacttttcggggaaatgtgcgcggaacccctatttgtttatttttctaaatacattcaaatatgtatccgctcatgagacaataaccctgataaatgcttcaataatagcacgtgaggagggccaccatggccaagttgaccagtgccgttccggtgctcaccgcgcgcgacgtcgccggagcggtcgagttctggaccgaccggctcgggttctcccgggacttcgtggaggacgacttcgccggtgtggtccgggacgacgtgaccctgttcatcagcgcggtccaggaccaggtggtgccggacaacaccctggcctgggtgtgggtgcgcggcctggacgagctgtacgccgagtggtcggaggtcgtgtccacgaacttccgggacgcctccgggccggccatgaccgagatcggcgagcagccgtgggggcgggagttcgccctgcgcgacccggccggcaactgcgtgcacttcgtggccgaggagcaggactgacacgtgctaaaacttcatttttaatttaaaaggatctaggtgaagatcctttttgataatctcatgaccaaaatcccttaacgtgagttttcgttccactgagcgtcagaccccgtagaaaagatcaaaggatcttcttgagatcctttttttctgcgcgtaatctgctgcttgcaaacaaaaaaaccaccgctaccagcggtggtttgtttgccggatcaagagctaccaactctttttccgaaggtaactggcttcagcagagcgcagataccaaatactgtccttctagtgtagccgtagttaggccaccacttcaagaactctgtagcaccgcctacatacctcgctctgctaatcctgttaccagtggctgctgccagtggcgataagtcgtgtcttaccgggttggactcaagacgatagttaccggataaggcgcagcggtcgggctgaacggggggttcgtgcacacagcccagcttggagcgaacgacctacaccgaactgagatacctacagcgtgagctatgagaaagcgccacgcttcccgaagggagaaaggcggacaggtatccggtaagcggcagggtcggaacaggagagcgcacgagggagcttccagggggaaacgcctggtatctttatagtcctgtcgggtttcgccacctctgacttgagcgtcgatttttgtgatgctcgtcaggggggcggagcctatggaaaaacgccagcaacgcggcctttttacggttcctgggcttttgctggccttttgctcacatgttctttcctgcgttatcccctgattctgtggataaccgtattaccgcctttgagtgagctgataccgctcgccgcagccgaacgaccgagcgcagcgagtcagtgagcgaggaagcggaagagcgcccaatacgcaaaccgcctctccccgcgcgttggccgattcattaatgcagctggcacgacaggtttcccgactggaaagcgggcagtgagcgcaacgcaattaatgtgagttagctcactcattaggcaccccaggctttacactttatgcttccggctcgtatgttgtgtggaattgtgagcggataacaatttcacacaggaaacagctatgaccatgattacgccaagctatttaggtgacactatagaatactcaagctatgcatc

SEQ ID NO: 45 - DNA, 5855 bp, Artificial Sequence
  Synthetic DNA vector
aagcttggtacttaatcgaaaaaaaaacagacagccatgtgctcttcggccttaattaaggtgcgtttttatgcttgtagtattgtataatgtttttaagatcctagggataacagggtaatgagctcggatccactagtctcacaattccacacaacatacgagccggaagcataaagtgtaaagcctggggtgcctaatgagtgagctaactcacattaggctgaattaggcgcgcctatttctattaattcccgatctagtaacatagatgacaccgcgcgcgataatttatcctagtttgcgcgctatattttgttttctatcgcgtattaaatgtataattgcgggactctaatcataaaaacccatctcataaataacgtcatgcattacatgttaattattacatgcttaacgtaattcaacagaaattatatgataatcatcgcaagaccggcaacaggattcaatcttaagaaactttattgccaaatgtttgaacgatcggggaaattcgggggatcgatcccgcgaactgtggacgagaactgtgccaccaagcgtaaggccgttctctcgcatttgccttgctaggctcgcgcgagttgctggctgaggcgttctcgaaatcagctcttgttcggtcggcatctactctattcctttgccctcggacgagtgctggggcgtcggtttccactatcggcgagtacttctacacagccatcggtccagacggccgcgcttctgcgggcgatttgtgtacgcccgacagtcccggctccggatcggacgattgcgtcgcatcgaccctgcgcccaagctgcatcatcgaaattgccgtcaaccaagctctgatagagttggtcaagaccaatgcggagcatatacgcccggagccgcggcgatcctgcaagctccggatgcctccgctcgaagtagcgcgtctgctgctccatacaagccaaccacggcctccagaagaagatgttggcgacctcgtattgggaatccccgaacatcgcctcgctccagtcaatgaccgctgttatgcggccattgtccgtcaggacattgttggagccgaaatccgcgtgcacgaggtgccggacttcggggcagtcctcggcccaaagcatcagctcatcgagagcctgcgcgacggacgcactgacggtgtcgtccatcacagtttgccagtgatacacatggggatcagcaatcgcgcatatgaaatcacgccatgtagtgtattgaccgattccttgcggtccgaatgggccgaacccgctcgtctggctaagatcggccgcagcgatcgcatccatggcctccgcgaccggctgcagaacagcgggcagttcggtttcaggcaggtcttgcaacgtgacaccctgtgcacggcgggagatgcaataggtcaggctctcgctgaatgccccaatgtcaagcacttccggaatcgggagcgcggccgatgcaaagtgccgataaacataacgatctttgtagaaaccatcggcgcagctatttacccgcaggacatatccacgccctcctacatcgaagctgaaagcacgagattcttcgccctccgagagctgcatcaggtcggagacgctgtcgaacttttcgatcagaaacttctcgacagacgtcgcggtgagttcaggctttttcatatcttattgccccccgggatcagatctggattgagagtgaatatgagactctaattggataccgaggggaatttatggaacgtcagtggagcatttttgacaagaaatatttgctagctgatagtgaccttaggcgacttttgaacgcgcaataatggtttctgacgtatgtgcttagctcattaaactccagaaacccgcggctgagtggctccttcaacgttgcggttctgtcagttccaaacgtaaaacggcttgtcccgcgtcatcggcgggggtcataacgtgactcccttaattctccgctcatgatcttgatcccctgcgccatcagatccttggcggcaagaaagccatccagtttactttgcagggcttcccaaccttaccagagggcgccccagctggcaattccggttcgcttgctgtccataaaaccgcccagtctagctatcgccatgtaagcccactgcaagctacctgctttctctttgcgcttgcgttttcccttgtccagatagcccagtagctgacattcatccggggtcagcaccgtttctgcggactggctttctacgtgttccgcttcctttagcagcccttgcgccctgagtgcttgcggcagcgtgaagctgatccgtcgagattaatagaaataaattcagcctaattcggcgttaattcagtacattaaaaacgtccgcaatgtggcggccgcggtatcactagtattacagaggtaagttataacagtcgcctaacctctagagggcccaattcgccctatagtgagtcgtattacaattcactggccgtcgttttacaacgtcgtgactgggaaaaccctggcgttacccaacttaatcgccttgcagcacatccccctttcgccagctggcgtaatagcgaagaggcccgcaccgatcgcccttcccaacagttgcgcagcctatacgtacggcagtttaaggtttacacctataaaagagagagccgttatcgtctgtttgtggatgtacagagtgatattattgacacgccggggcgacggatggtgatccccctggccagtgcacgtctgctgtcagataaagtctcccgtgaactttacccggtggtgcatatcggggatgaaagctggcgcatgatgaccaccgatatggccagtgtgccggtctccgttatcggggaagaagtggctgatctcagccaccgcgaaaatgacatcaaaaacgccattaacctgatgttctggggaatataaatgtcaggcatgagattatcaaaaaggatcttcacctagatccttttcacgtagaaagccagtccgcagaaacggtgctgaccccggatgaatgtcagctactgggctatctggacaagggaaaacgcaagcgcaaagagaaagcaggtagcttgcagtgggcttacatggcgatagctagactgggcggttttatggacagcaagcgaaccggaattgccagctggggcgccctctggtaaggttgggaagccctgcaaagtaaactggatggctttctcgccgccaaggatctgatggcgcaggggatcaagctctgatcaagagacaggatgaggatcgtttcgcatgattgaacaagatggattgcacgcaggttctccggccgcttgggtggagaggctattcggctatgactgggcacaacagacaatcggctgctctgatgccgccgtgttccggctgtcagcgcaggggcgcccggttctttttgtcaagaccgacctgtccggtgccctgaatgaactgcaagacgaggcagcgcggctatcgtggctggccacgacgggcgttccttgcgcagctgtgctcgacgttgtcactgaagcgggaagggactggctgctattgggcgaagtgccggggcaggatctcctgtcatctcaccttgctcctgccgagaaagtatccatcatggctgatgcaatgcggcggctgcatacgcttgatccggctacctgcccattcgaccaccaagcgaaacatcgcatcgagcgagcacgtactcggatggaagccggtcttgtcgatcaggatgatctggacgaagagcatcaggggctcgcgccagccgaactgttcgccaggctcaaggcgagcatgcccgacggcgaggatctcgtcgtgacccatggcgatgcctgcttgccgaatatcatggtggaaaatggccgcttttctggattcatcgactgtggccggctgggtgtggcggaccgctatcaggacatagcgttggctacccgtgatattgctgaagagcttggcggcgaatgggctgaccgcttcctcgtgctttacggtatcgccgctcccgattcgcagcgcatcgccttctatcgccttcttgacgagttcttctgaattattaacgcttacaatttcctgatgcggtattttctccttacgcatctgtgcggtatttcacaccgcatacaggtggcacttttcggggaaatgtgcgcggaacccctatttgtttatttttctaaatacattcaaatatgtatccgctcatgagacaataaccctgataaatgcttcaataatagcacgtgaggagggccaccatggccaagttgaccagtgccgttccggtgctcaccgcgcgcgacgtcgccggagcggtcgagttctggaccgaccggctcgggttctcccgggacttcgtggaggacgacttcgccggtgtggtccgggacgacgtgaccctgttcatcagcgcggtccaggaccaggtggtgccggacaacaccctggcctgggtgtgggtgcgcggcctggacgagctgtacgccgagtggtcggaggtcgtgtccacgaacttccgggacgcctccgggccggccatgaccgagatcggcgagcagccgtgggggcgggagttcgccctgcgcgacccggccggcaactgcgtgcacttcgtggccgaggagcaggactgacacgtgctaaaacttcatttttaatttaaaaggatctaggtgaagatcctttttgataatctcatgaccaaaatcccttaacgtgagttttcgttccactgagcgtcagaccccgtagaaaagatcaaaggatcttcttgagatcctttttttctgcgcgtaatctgctgcttgcaaacaaaaaaaccaccgctaccagcggtggtttgtttgccggatcaagagctaccaactctttttccgaaggtaactggcttcagcagagcgcagataccaaatactgtccttctagtgtagccgtagttaggccaccacttcaagaactctgtagcaccgcctacatacctcgctctgctaatcctgttaccagtggctgctgccagtggcgataagtcgtgtcttaccgggttggactcaagacgatagttaccggataaggcgcagcggtcgggctgaacggggggttcgtgcacacagcccagcttggagcgaacgacctacaccgaactgagatacctacagcgtgagctatgagaaagcgccacgcttcccgaagggagaaaggcggacaggtatccggtaagcggcagggtcggaacaggagagcgcacgagggagcttccagggggaaacgcctggtatctttatagtcctgtcgggtttcgccacctctgacttgagcgtcgatttttgtgatgctcgtcaggggggcggagcctatggaaaaacgccagcaacgcggcctttttacggttcctgggcttttgctggccttttgctcacatgttctttcctgcgttatcccctgattctgtggataaccgtattaccgcctttgagtgagctgataccgctcgccgcagccgaacgaccgagcgcagcgagtcagtgagcgaggaagcggaagagcgcccaatacgcaaaccgcctctccccgcgcgttggccgattcattaatgcagctggcacgacaggtttcccgactggaaagcgggcagtgagcgcaacgcaattaatgtgagttagctcactcattaggcaccccaggctttacactttatgcttccggctcgtatgttgtgtggaattgtgagcggataacaatttcacacaggaaacagctatgaccatgattacgccaagctatttaggtgacactatagaatactcaagctatgcatc

SEQ ID NO: 46 - DNA, 5855 bp, Artificial Sequence
  Synthetic DNA vector
aagcttggtggacatgattatggaacacacacacgctagccgcccagttccttaattaaggtgcgtttttatgcttgtagtattgtataatgtttttaagatcctagggataacagggtaatgagctcggatccactagtctcacaattccacacaacatacgagccggaagcataaagtgtaaagcctggggtgcctaatgagtgagctaactcacattaggctgaattaggcgcgcctatttctattaattcccgatctagtaacatagatgacaccgcgcgcgataatttatcctagtttgcgcgctatattttgttttctatcgcgtattaaatgtataattgcgggactctaatcataaaaacccatctcataaataacgtcatgcattacatgttaattattacatgcttaacgtaattcaacagaaattatatgataatcatcgcaagaccggcaacaggattcaatcttaagaaactttattgccaaatgtttgaacgatcggggaaattcgggggatcgatcccgcgaactgtggacgagaactgtgccaccaagcgtaaggccgttctctcgcatttgccttgctaggctcgcgcgagttgctggctgaggcgttctcgaaatcagctcttgttcggtcggcatctactctattcctttgccctcggacgagtgctggggcgtcggtttccactatcggcgagtacttctacacagccatcggtccagacggccgcgcttctgcgggcgatttgtgtacgcccgacagtcccggctccggatcggacgattgcgtcgcatcgaccctgcgcccaagctgcatcatcgaaattgccgtcaaccaagctctgatagagttggtcaagaccaatgcggagcatatacgcccggagccgcggcgatcctgcaagctccggatgcctccgctcgaagtagcgcgtctgctgctccatacaagccaaccacggcctccagaagaagatgttggcgacctcgtattgggaatccccgaacatcgcctcgctccagtcaatgaccgctgttatgcggccattgtccgtcaggacattgttggagccgaaatccgcgtgcacgaggtgccggacttcggggcagtcctcggcccaaagcatcagctcatcgagagcctgcgcgacggacgcactgacggtgtcgtccatcacagtttgccagtgatacacatggggatcagcaatcgcgcatatgaaatcacgccatgtagtgtattgaccgattccttgcggtccgaatgggccgaacccgctcgtctggctaagatcggccgcagcgatcgcatccatggcctccgcgaccggctgcagaacagcgggcagttcggtttcaggcaggtcttgcaacgtgacaccctgtgcacggcgggagatgcaataggtcaggctctcgctgaatgccccaatgtcaagcacttccggaatcgggagcgcggccgatgcaaagtgccgataaacataacgatctttgtagaaaccatcggcgcagctatttacccgcaggacatatccacgccctcctacatcgaagctgaaagcacgagattcttcgccctccgagagctgcatcaggtcggagacgctgtcgaacttttcgatcagaaacttctcgacagacgtcgcggtgagttcaggctttttcatatcttattgccccccgggatcagatctggattgagagtgaatatgagactctaattggataccgaggggaatttatggaacgtcagtggagcatttttgacaagaaatatttgctagctgatagtgaccttaggcgacttttgaacgcgcaataatggtttctgacgtatgtgcttagctcattaaactccagaaacccgcggctgagtggctccttcaacgttgcggttctgtcagttccaaacgtaaaacggcttgtcccgcgtcatcggcgggggtcataacgtgactcccttaattctccgctcatgatcttgatcccctgcgccatcagatccttggcggcaagaaagccatccagtttactttgcagggcttcccaaccttaccagagggcgccccagctggcaattccggttcgcttgctgtccataaaaccgcccagtctagctatcgccatgtaagcccactgcaagctacctgctttctctttgcgcttgcgttttcccttgtccagatagcccagtagctgacattcatccggggtcagcaccgtttctgcggactggctttctacgtgttccgcttcctttagcagcccttgcgccctgagtgcttgcggcagcgtgaagctgatccgtcgagattaatagaaataaattcagcctaattcggcgttaattcagtacattaaaaacgtccgcaatgtggcggccgcggtatcactagtattacagaggtaagttataacagtcgcctaacctctagagggcccaattcgccctatagtgagtcgtattacaattcactggccgtcgttttacaacgtcgtgactgggaaaaccctggcgttacccaacttaatcgccttgcagcacatccccctttcgccagctggcgtaatagcgaagaggcccgcaccgatcgcccttcccaacagttgcgcagcctatacgtacggcagtttaaggtttacacctataaaagagagagccgttatcgtctgtttgtggatgtacagagtgatattattgacacgccggggcgacggatggtgatccccctggccagtgcacgtctgctgtcagataaagtctcccgtgaactttacccggtggtgcatatcggggatgaaagctggcgcatgatgaccaccgatatggccagtgtgccggtctccgttatcggggaagaagtggctgatctcagccaccgcgaaaatgacatcaaaaacgccattaacctgatgttctggggaatataaatgtcaggcatgagattatcaaaaaggatcttcacctagatccttttcacgtagaaagccagtccgcagaaacggtgctgaccccggatgaatgtcagctactgggctatctggacaagggaaaacgcaagcgcaaagagaaagcaggtagcttgcagtgggcttacatggcgatagctagactgggcggttttatggacagcaagcgaaccggaattgccagctggggcgccctctggtaaggttgggaagccctgcaaagtaaactggatggctttctcgccgccaaggatctgatggcgcaggggatcaagctctgatcaagagacaggatgaggatcgtttcgcatgattgaacaagatggattgcacgcaggttctccggccgcttgggtggagaggctattcggctatgactgggcacaacagacaatcggctgctctgatgccgccgtgttccggctgtcagcgcaggggcgcccggttctttttgtcaagaccgacctgtccggtgccctgaatgaactgcaagacgaggcagcgcggctatcgtggctggccacgacgggcgttccttgcgcagctgtgctcgacgttgtcactgaagcgggaagggactggctgctattgggcgaagtgccggggcaggatctcctgtcatctcaccttgctcctgccgagaaagtatccatcatggctgatgcaatgcggcggctgcatacgcttgatccggctacctgcccattcgaccaccaagcgaaacatcgcatcgagcgagcacgtactcggatggaagccggtcttgtcgatcaggatgatctggacgaagagcatcaggggctcgcgccagccgaactgttcgccaggctcaaggcgagcatgcccgacggcgaggatctcgtcgtgacccatggcgatgcctgcttgccgaatatcatggtggaaaatggccgcttttctggattcatcgactgtggccggctgggtgtggcggaccgctatcaggacatagcgttggctacccgtgatattgctgaagagcttggcggcgaatgggctgaccgcttcctcgtgctttacggtatcgccgctcccgattcgcagcgcatcgccttctatcgccttcttgacgagttcttctgaattattaacgcttacaatttcctgatgcggtattttctccttacgcatctgtgcggtatttcacaccgcatacaggtggcacttttcggggaaatgtgcgcggaacccctatttgtttatttttctaaatacattcaaatatgtatccgctcatgagacaataaccctgataaatgcttcaataatagcacgtgaggagggccaccatggccaagttgaccagtgccgttccggtgctcaccgcgcgcgacgtcgccggagcggtcgagttctggaccgaccggctcgggttctcccgggacttcgtggaggacgacttcgccggtgtggtccgggacgacgtgaccctgttcatcagcgcggtccaggaccaggtggtgccggacaacaccctggcctgggtgtgggtgcgcggcctggacgagctgtacgccgagtggtcggaggtcgtgtccacgaacttccgggacgcctccgggccggccatgaccgagatcggcgagcagccgtgggggcgggagttcgccctgcgcgacccggccggcaactgcgtgcacttcgtggccgaggagcaggactgacacgtgctaaaacttcatttttaatttaaaaggatctaggtgaagatcctttttgataatctcatgaccaaaatcccttaacgtgagttttcgttccactgagcgtcagaccccgtagaaaagatcaaaggatcttcttgagatcctttttttctgcgcgtaatctgctgcttgcaaacaaaaaaaccaccgctaccagcggtggtttgtttgccggatcaagagctaccaactctttttccgaaggtaactggcttcagcagagcgcagataccaaatactgtccttctagtgtagccgtagttaggccaccacttcaagaactctgtagcaccgcctacatacctcgctctgctaatcctgttaccagtggctgctgccagtggcgataagtcgtgtcttaccgggttggactcaagacgatagttaccggataaggcgcagcggtcgggctgaacggggggttcgtgcacacagcccagcttggagcgaacgacctacaccgaactgagatacctacagcgtgagctatgagaaagcgccacgcttcccgaagggagaaaggcggacaggtatccggtaagcggcagggtcggaacaggagagcgcacgagggagcttccagggggaaacgcctggtatctttatagtcctgtcgggtttcgccacctctgacttgagcgtcgatttttgtgatgctcgtcaggggggcggagcctatggaaaaacgccagcaacgcggcctttttacggttcctgggcttttgctggccttttgctcacatgttctttcctgcgttatcccctgattctgtggataaccgtattaccgcctttgagtgagctgataccgctcgccgcagccgaacgaccgagcgcagcgagtcagtgagcgaggaagcggaagagcgcccaatacgcaaaccgcctctccccgcgcgttggccgattcattaatgcagctggcacgacaggtttcccgactggaaagcgggcagtgagcgcaacgcaattaatgtgagttagctcactcattaggcaccccaggctttacactttatgcttccggctcgtatgttgtgtggaattgtgagcggataacaatttcacacaggaaacagctatgaccatgattacgccaagctatttaggtgacactatagaatactcaagctatgcatc

SEQ ID NO: 47 - DNA, 5855 bp, Artificial Sequence
  Synthetic DNA vector
aagcttggtgagcccaaacagcgaaatacctgagcgaacaaatactactccttaattaaggtgcgtttttatgcttgtagtattgtataatgtttttaagatcctagggataacagggtaatgagctcggatccactagtctcacaattccacacaacatacgagccggaagcataaagtgtaaagcctggggtgcctaatgagtgagctaactcacattaggctgaattaggcgcgcctatttctattaattcccgatctagtaacatagatgacaccgcgcgcgataatttatcctagtttgcgcgctatattttgttttctatcgcgtattaaatgtataattgcgggactctaatcataaaaacccatctcataaataacgtcatgcattacatgttaattattacatgcttaacgtaattcaacagaaattatatgataatcatcgcaagaccggcaacaggattcaatcttaagaaactttattgccaaatgtttgaacgatcggggaaattcgggggatcgatcccgcgaactgtggacgagaactgtgccaccaagcgtaaggccgttctctcgcatttgccttgctaggctcgcgcgagttgctggctgaggcgttctcgaaatcagctcttgttcggtcggcatctactctattcctttgccctcggacgagtgctggggcgtcggtttccactatcggcgagtacttctacacagccatcggtccagacggccgcgcttctgcgggcgatttgtgtacgcccgacagtcccggctccggatcggacgattgcgtcgcatcgaccctgcgcccaagctgcatcatcgaaattgccgtcaaccaagctctgatagagttggtcaagaccaatgcggagcatatacgcccggagccgcggcgatcctgcaagctccggatgcctccgctcgaagtagcgcgtctgctgctccatacaagccaaccacggcctccagaagaagatgttggcgacctcgtattgggaatccccgaacatcgcctcgctccagtcaatgaccgctgttatgcggccattgtccgtcaggacattgttggagccgaaatccgcgtgcacgaggtgccggacttcggggcagtcctcggcccaaagcatcagctcatcgagagcctgcgcgacggacgcactgacggtgtcgtccatcacagtttgccagtgatacacatggggatcagcaatcgcgcatatgaaatcacgccatgtagtgtattgaccgattccttgcggtccgaatgggccgaacccgctcgtctggctaagatcggccgcagcgatcgcatccatggcctccgcgaccggctgcagaacagcgggcagttcggtttcaggcaggtcttgcaacgtgacaccctgtgcacggcgggagatgcaataggtcaggctctcgctgaatgccccaatgtcaagcacttccggaatcgggagcgcggccgatgcaaagtgccgataaacataacgatctttgtagaaaccatcggcgcagctatttacccgcaggacatatccacgccctcctacatcgaagctgaaagcacgagattcttcgccctccgagagctgcatcaggtcggagacgctgtcgaacttttcgatcagaaacttctcgacagacgtcgcggtgagttcaggctttttcatatcttattgccccccgggatcagatctggattgagagtgaatatgagactctaattggataccgaggggaatttatggaacgtcagtggagcatttttgacaagaaatatttgctagctgatagtgaccttaggcgacttttgaacgcgcaataatggtttctgacgtatgtgcttagctcattaaactccagaaacccgcggctgagtggctccttcaacgttgcggttctgtcagttccaaacgtaaaacggcttgtcccgcgtcatcggcgggggtcataacgtgactcccttaattctccgctcatgatcttgatcccctgcgccatcagatccttggcggcaagaaagccatccagtttactttgcagggcttcccaaccttaccagagggcgccccagctggcaattccggttcgcttgctgtccataaaaccgcccagtctagctatcgccatgtaagcccactgcaagctacctgctttctctttgcgcttgcgttttcccttgtccagatagcccagtagctgacattcatccggggtcagcaccgtttctgcggactggctttctacgtgttccgcttcctttagcagcccttgcgccctgagtgcttgcggcagcgtgaagctgatccgtcgagattaatagaaataaattcagcctaattcggcgttaattcagtacattaaaaacgtccgcaatgtggcggccgcggtatcactagtattacagaggtaagttataacagtcgcctaacctctagagggcccaattcgccctatagtgagtcgtattacaattcactggccgtcgttttacaacgtcgtgactgggaaaaccctggcgttacccaacttaatcgccttgcagcacatccccctttcgccagctggcgtaatagcgaagaggcccgcaccgatcgcccttcccaacagttgcgcagcctatacgtacggcagtttaaggtttacacctataaaagagagagccgttatcgtctgtttgtggatgtacagagtgatattattgacacgccggggcgacggatggtgatccccctggccagtgcacgtctgctgtcagataaagtctcccgtgaactttacccggtggtgcatatcggggatgaaagctggcgcatgatgaccaccgatatggccagtgtgccggtctccgttatcggggaagaagtggctgatctcagccaccgcgaaaatgacatcaaaaacgccattaacctgatgttctggggaatataaatgtcaggcatgagattatcaaaaaggatcttcacctagatccttttcacgtagaaagccagtccgcagaaacggtgctgaccccggatgaatgtcagctactgggctatctggacaagggaaaacgcaagcgcaaagagaaagcaggtagcttgcagtgggcttacatggcgatagctagactgggcggttttatggacagcaagcgaaccggaattgccagctggggcgccctctggtaaggttgggaagccctgcaaagtaaactggatggctttctcgccgccaaggatctgatggcgcaggggatcaagctctgatcaagagacaggatgaggatcgtttcgcatgattgaacaagatggattgcacgcaggttctccggccgcttgggtggagaggctattcggctatgactgggcacaacagacaatcggctgctctgatgccgccgtgttccggctgtcagcgcaggggcgcccggttctttttgtcaagaccgacctgtccggtgccctgaatgaactgcaagacgaggcagcgcggctatcgtggctggccacgacgggcgttccttgcgcagctgtgctcgacgttgtcactgaagcgggaagggactggctgctattgggcgaagtgccggggcaggatctcctgtcatctcaccttgctcctgccgagaaagtatccatcatggctgatgcaatgcggcggctgcatacgcttgatccggctacctgcccattcgaccaccaagcgaaacatcgcatcgagcgagcacgtactcggatggaagccggtcttgtcgatcaggatgatctggacgaagagcatcaggggctcgcgccagccgaactgttcgccaggctcaaggcgagcatgcccgacggcgaggatctcgtcgtgacccatggcgatgcctgcttgccgaatatcatggtggaaaatggccgcttttctggattcatcgactgtggccggctgggtgtggcggaccgctatcaggacatagcgttggctacccgtgatattgctgaagagcttggcggcgaatgggctgaccgcttcctcgtgctttacggtatcgccgctcccgattcgcagcgcatcgccttctatcgccttcttgacgagttcttctgaattattaacgcttacaatttcctgatgcggtattttctccttacgcatctgtgcggtatttcacaccgcatacaggtggcacttttcggggaaatgtgcgcggaacccctatttgtttatttttctaaatacattcaaatatgtatccgctcatgagacaataaccctgataaatgcttcaataatagcacgtgaggagggccaccatggccaagttgaccagtgccgttccggtgctcaccgcgcgcgacgtcgccggagcggtcgagttctggaccgaccggctcgggttctcccgggacttcgtggaggacgacttcgccggtgtggtccgggacgacgtgaccctgttcatcagcgcggtccaggaccaggtggtgccggacaacaccctggcctgggtgtgggtgcgcggcctggacgagctgtacgccgagtggtcggaggtcgtgtccacgaacttccgggacgcctccgggccggccatgaccgagatcggcgagcagccgtgggggcgggagttcgccctgcgcgacccggccggcaactgcgtgcacttcgtggccgaggagcaggactgacacgtgctaaaacttcatttttaatttaaaaggatctaggtgaagatcctttttgataatctcatgaccaaaatcccttaacgtgagttttcgttccactgagcgtcagaccccgtagaaaagatcaaaggatcttcttgagatcctttttttctgcgcgtaatctgctgcttgcaaacaaaaaaaccaccgctaccagcggtggtttgtttgccggatcaagagctaccaactctttttccgaaggtaactggcttcagcagagcgcagataccaaatactgtccttctagtgtagccgtagttaggccaccacttcaagaactctgtagcaccgcctacatacctcgctctgctaatcctgttaccagtggctgctgccagtggcgataagtcgtgtcttaccgggttggactcaagacgatagttaccggataaggcgcagcggtcgggctgaacggggggttcgtgcacacagcccagcttggagcgaacgacctacaccgaactgagatacctacagcgtgagctatgagaaagcgccacgcttcccgaagggagaaaggcggacaggtatccggtaagcggcagggtcggaacaggagagcgcacgagggagcttccagggggaaacgcctggtatctttatagtcctgtcgggtttcgccacctctgacttgagcgtcgatttttgtgatgctcgtcaggggggcggagcctatggaaaaacgccagcaacgcggcctttttacggttcctgggcttttgctggccttttgctcacatgttctttcctgcgttatcccctgattctgtggataaccgtattaccgcctttgagtgagctgataccgctcgccgcagccgaacgaccgagcgcagcgagtcagtgagcgaggaagcggaagagcgcccaatacgcaaaccgcctctccccgcgcgttggccgattcattaatgcagctggcacgacaggtttcccgactggaaagcgggcagtgagcgcaacgcaattaatgtgagttagctcactcattaggcaccccaggctttacactttatgcttccggctcgtatgttgtgtggaattgtgagcggataacaatttcacacaggaaacagctatgaccatgattacgccaagctatttaggtgacactatagaatactcaagctatgcatc

SEQ ID NO: 48 - DNA, 5284 bp, Artificial Sequence
  Synthetic DNA vector
aagcttggtgcgtttttatgcttgtagtattgtataatgtttttaagatccttaattaaggtgcgtttttatgcttgtagtattgtataatgtttttaagatcctagggataacagggtaatgagctcggatccactagttcgggggatctggattttagtactggattttggttttaggaattagaaattttattgatagaagtattttacaaatacaaatacatactaagggtttcttatatgctcaacacatgagcgaaaccctataggaaccctaattcccttatctgggaactactcacacattattatggagaaactcgagtcaaatctcggtgacgggcaggaccggacggggcggtaccggcaggctgaagtccagctgccagaaacccacgtcatgccagttcccgtgcttgaagccggccgcccgcagcatgccgcggggggcatatccgagcgcctcgtgcatgcgcacgctcgggtcgttgggcagcccgatgacagcgaccacgctcttgaagccctgtgcctccagggacttcagcaggtgggtgtagagcgtggagcccagtcccgtccgctggtggcggggggagacgtacacggtcgactcggccgtccagtcgtaggcgttgcgtgccttccaggggcccgcgtaggcgatgccggcgacctcgccgtccacctcggcgacgagccagggatagcgctcccgcagacggacgaggtcgtccgtccactcctgcggttcctgcggctcggtacggaagttgaccgtgcttgtctcgatgtagtggttgacgatggtgcagaccgccggcatgtccgcctcggtggcacggcggatgtcggccgggcgtcgttctgggctcatggtagactcgagagagatagatttgtagagagagactggtgatttcagcgtgtcctctccaaatgaaatgaacttccttatatagaggaaggtcttgcgaaggatagtgggattgtgcgtcatcccttacgtcagtggagatatcacatcaatccacttgctttgaagacgtggttggaacgtcttctttttccacgatgctcctcgtgggtgggggtccatctttgggaccactgtcggcagaggcatcttgaacgatagcctttcctttatcgcaatgatggcatttgtaggtgccaccttccttttctactgtccttttgatgaagtgacagatagctgggcaatggaatccgaggaggtttcccgatattaccctttgttgaaaagtctcaatagccctttggtcttctgagactgtatctttgatattcttggagtagacgagagtgtcgtgctccaccatgttatcacatcaatccacttgctttgaagacgtggttggaacgtcttctttttccacgatgctcctcgtgggtgggggtccatctttgggaccactgtcggcagaggcatcttgaacgatagcctttcctttatcgcaatgatggcatttgtaggtgccaccttccttttctactgtccttttgatgaagtgacagatagctgggcaatggaatccgaggaggtttcccgatattaccctttgttgaaaagtctcaatagccctttggtcttctgagactgtatctttgatattcttggagtagacgagagtgtcgtgctccaccatgttggcaagctgctctagccaatacgcaaaccgcctctccccgcgcgttggccgattcattaatgcagctggcacgacaggtttcccgactggaaagcgggcagtgagcgcaacgcaattaatgtgagttagctcactcattaggcaccccagcggccgcggtatcactagtattacagaggtaagttataacagtcgcctaacctctagagggcccaattcgccctatagtgagtcgtattacaattcactggccgtcgttttacaacgtcgtgactgggaaaaccctggcgttacccaacttaatcgccttgcagcacatccccctttcgccagctggcgtaatagcgaagaggcccgcaccgatcgcccttcccaacagttgcgcagcctatacgtacggcagtttaaggtttacacctataaaagagagagccgttatcgtctgtttgtggatgtacagagtgatattattgacacgccggggcgacggatggtgatccccctggccagtgcacgtctgctgtcagataaagtctcccgtgaactttacccggtggtgcatatcggggatgaaagctggcgcatgatgaccaccgatatggccagtgtgccggtctccgttatcggggaagaagtggctgatctcagccaccgcgaaaatgacatcaaaaacgccattaacctgatgttctggggaatataaatgtcaggcatgagattatcaaaaaggatcttcacctagatccttttcacgtagaaagccagtccgcagaaacggtgctgaccccggatgaatgtcagctactgggctatctggacaagggaaaacgcaagcgcaaagagaaagcaggtagcttgcagtgggcttacatggcgatagctagactgggcggttttatggacagcaagcgaaccggaattgccagctggggcgccctctggtaaggttgggaagccctgcaaagtaaactggatggctttctcgccgccaaggatctgatggcgcaggggatcaagctctgatcaagagacaggatgaggatcgtttcgcatgattgaacaagatggattgcacgcaggttctccggccgcttgggtggagaggctattcggctatgactgggcacaacagacaatcggctgctctgatgccgccgtgttccggctgtcagcgcaggggcgcccggttctttttgtcaagaccgacctgtccggtgccctgaatgaactgcaagacgaggcagcgcggctatcgtggctggccacgacgggcgttccttgcgcagctgtgctcgacgttgtcactgaagcgggaagggactggctgctattgggcgaagtgccggggcaggatctcctgtcatctcaccttgctcctgccgagaaagtatccatcatggctgatgcaatgcggcggctgcatacgcttgatccggctacctgcccattcgaccaccaagcgaaacatcgcatcgagcgagcacgtactcggatggaagccggtcttgtcgatcaggatgatctggacgaagagcatcaggggctcgcgccagccgaactgttcgccaggctcaaggcgagcatgcccgacggcgaggatctcgtcgtgacccatggcgatgcctgcttgccgaatatcatggtggaaaatggccgcttttctggattcatcgactgtggccggctgggtgtggcggaccgctatcaggacatagcgttggctacccgtgatattgctgaagagcttggcggcgaatgggctgaccgcttcctcgtgctttacggtatcgccgctcccgattcgcagcgcatcgccttctatcgccttcttgacgagttcttctgaattattaacgcttacaatttcctgatgcggtattttctccttacgcatctgtgcggtatttcacaccgcatacaggtggcacttttcggggaaatgtgcgcggaacccctatttgtttatttttctaaatacattcaaatatgtatccgctcatgagacaataaccctgataaatgcttcaataatagcacgtgaggagggccaccatggccaagttgaccagtgccgttccggtgctcaccgcgcgcgacgtcgccggagcggtcgagttctggaccgaccggctcgggttctcccgggacttcgtggaggacgacttcgccggtgtggtccgggacgacgtgaccctgttcatcagcgcggtccaggaccaggtggtgccggacaacaccctggcctgggtgtgggtgcgcggcctggacgagctgtacgccgagtggtcggaggtcgtgtccacgaacttccgggacgcctccgggccggccatgaccgagatcggcgagcagccgtgggggcgggagttcgccctgcgcgacccggccggcaactgcgtgcacttcgtggccgaggagcaggactgacacgtgctaaaacttcatttttaatttaaaaggatctaggtgaagatcctttttgataatctcatgaccaaaatcccttaacgtgagttttcgttccactgagcgtcagaccccgtagaaaagatcaaaggatcttcttgagatcctttttttctgcgcgtaatctgctgcttgcaaacaaaaaaaccaccgctaccagcggtggtttgtttgccggatcaagagctaccaactctttttccgaaggtaactggcttcagcagagcgcagataccaaatactgtccttctagtgtagccgtagttaggccaccacttcaagaactctgtagcaccgcctacatacctcgctctgctaatcctgttaccagtggctgctgccagtggcgataagtcgtgtcttaccgggttggactcaagacgatagttaccggataaggcgcagcggtcgggctgaacggggggttcgtgcacacagcccagcttggagcgaacgacctacaccgaactgagatacctacagcgtgagctatgagaaagcgccacgcttcccgaagggagaaaggcggacaggtatccggtaagcggcagggtcggaacaggagagcgcacgagggagcttccagggggaaacgcctggtatctttatagtcctgtcgggtttcgccacctctgacttgagcgtcgatttttgtgatgctcgtcaggggggcggagcctatggaaaaacgccagcaacgcggcctttttacggttcctgggcttttgctggccttttgctcacatgttctttcctgcgttatcccctgattctgtggataaccgtattaccgcctttgagtgagctgataccgctcgccgcagccgaacgaccgagcgcagcgagtcagtgagcgaggaagcggaagagcgcccaatacgcaaaccgcctctccccgcgcgttggccgattcattaatgcagctggcacgacaggtttcccgactggaaagcgggcagtgagcgcaacgcaattaatgtgagttagctcactcattaggcaccccaggctttacactttatgcttccggctcgtatgttgtgtggaattgtgagcggataacaatttcacacaggaaacagctatgaccatgattacgccaagctatttaggtgacactatagaatactcaagctatgcatc

SEQ ID NO: 49 - DNA, 5284 bp, Artificial Sequence
  Synthetic DNA vector
aagcttggttgcttgcaaaagcagtaattggaaagcactctcaaagaatccttaattaaggtgcgtttttatgcttgtagtattgtataatgtttttaagatcctagggataacagggtaatgagctcggatccactagttcgggggatctggattttagtactggattttggttttaggaattagaaattttattgatagaagtattttacaaatacaaatacatactaagggtttcttatatgctcaacacatgagcgaaaccctataggaaccctaattcccttatctgggaactactcacacattattatggagaaactcgagtcaaatctcggtgacgggcaggaccggacggggcggtaccggcaggctgaagtccagctgccagaaacccacgtcatgccagttcccgtgcttgaagccggccgcccgcagcatgccgcggggggcatatccgagcgcctcgtgcatgcgcacgctcgggtcgttgggcagcccgatgacagcgaccacgctcttgaagccctgtgcctccagggacttcagcaggtgggtgtagagcgtggagcccagtcccgtccgctggtggcggggggagacgtacacggtcgactcggccgtccagtcgtaggcgttgcgtgccttccaggggcccgcgtaggcgatgccggcgacctcgccgtccacctcggcgacgagccagggatagcgctcccgcagacggacgaggtcgtccgtccactcctgcggttcctgcggctcggtacggaagttgaccgtgcttgtctcgatgtagtggttgacgatggtgcagaccgccggcatgtccgcctcggtggcacggcggatgtcggccgggcgtcgttctgggctcatggtagactcgagagagatagatttgtagagagagactggtgatttcagcgtgtcctctccaaatgaaatgaacttccttatatagaggaaggtcttgcgaaggatagtgggattgtgcgtcatcccttacgtcagtggagatatcacatcaatccacttgctttgaagacgtggttggaacgtcttctttttccacgatgctcctcgtgggtgggggtccatctttgggaccactgtcggcagaggcatcttgaacgatagcctttcctttatcgcaatgatggcatttgtaggtgccaccttccttttctactgtccttttgatgaagtgacagatagctgggcaatggaatccgaggaggtttcccgatattaccctttgttgaaaagtctcaatagccctttggtcttctgagactgtatctttgatattcttggagtagacgagagtgtcgtgctccaccatgttatcacatcaatccacttgctttgaagacgtggttggaacgtcttctttttccacgatgctcctcgtgggtgggggtccatctttgggaccactgtcggcagaggcatcttgaacgatagcctttcctttatcgcaatgatggcatttgtaggtgccaccttccttttctactgtccttttgatgaagtgacagatagctgggcaatggaatccgaggaggtttcccgatattaccctttgttgaaaagtctcaatagccctttggtcttctgagactgtatctttgatattcttggagtagacgagagtgtcgtgctccaccatgttggcaagctgctctagccaatacgcaaaccgcctctccccgcgcgttggccgattcattaatgcagctggcacgacaggtttcccgactggaaagcgggcagtgagcgcaacgcaattaatgtgagttagctcactcattaggcaccccagcggccgcggtatcactagtattacagaggtaagttataacagtcgcctaacctctagagggcccaattcgccctatagtgagtcgtattacaattcactggccgtcgttttacaacgtcgtgactgggaaaaccctggcgttacccaacttaatcgccttgcagcacatccccctttcgccagctggcgtaatagcgaagaggcccgcaccgatcgcccttcccaacagttgcgcagcctatacgtacggcagtttaaggtttacacctataaaagagagagccgttatcgtctgtttgtggatgtacagagtgatattattgacacgccggggcgacggatggtgatccccctggccagtgcacgtctgctgtcagataaagtctcccgtgaactttacccggtggtgcatatcggggatgaaagctggcgcatgatgaccaccgatatggccagtgtgccggtctccgttatcggggaagaagtggctgatctcagccaccgcgaaaatgacatcaaaaacgccattaacctgatgttctggggaatataaatgtcaggcatgagattatcaaaaaggatcttcacctagatccttttcacgtagaaagccagtccgcagaaacggtgctgaccccggatgaatgtcagctactgggctatctggacaagggaaaacgcaagcgcaaagagaaagcaggtagcttgcagtgggcttacatggcgatagctagactgggcggttttatggacagcaagcgaaccggaattgccagctggggcgccctctggtaaggttgggaagccctgcaaagtaaactggatggctttctcgccgccaaggatctgatggcgcaggggatcaagctctgatcaagagacaggatgaggatcgtttcgcatgattgaacaagatggattgcacgcaggttctccggccgcttgggtggagaggctattcggctatgactgggcacaacagacaatcggctgctctgatgccgccgtgttccggctgtcagcgcaggggcgcccggttctttttgtcaagaccgacctgtccggtgccctgaatgaactgcaagacgaggcagcgcggctatcgtggctggccacgacgggcgttccttgcgcagctgtgctcgacgttgtcactgaagcgggaagggactggctgctattgggcgaagtgccggggcaggatctcctgtcatctcaccttgctcctgccgagaaagtatccatcatggctgatgcaatgcggcggctgcatacgcttgatccggctacctgcccattcgaccaccaagcgaaacatcgcatcgagcgagcacgtactcggatggaagccggtcttgtcgatcaggatgatctggacgaagagcatcaggggctcgcgccagccgaactgttcgccaggctcaaggcgagcatgcccgacggcgaggatctcgtcgtgacccatggcgatgcctgcttgccgaatatcatggtggaaaatggccgcttttctggattcatcgactgtggccggctgggtgtggcggaccgctatcaggacatagcgttggctacccgtgatattgctgaagagcttggcggcgaatgggctgaccgcttcctcgtgctttacggtatcgccgctcccgattcgcagcgcatcgccttctatcgccttcttgacgagttcttctgaattattaacgcttacaatttcctgatgcggtattttctccttacgcatctgtgcggtatttcacaccgcatacaggtggcacttttcggggaaatgtgcgcggaacccctatttgtttatttttctaaatacattcaaatatgtatccgctcatgagacaataaccctgataaatgcttcaataatagcacgtgaggagggccaccatggccaagttgaccagtgccgttccggtgctcaccgcgcgcgacgtcgccggagcggtcgagttctggaccgaccggctcgggttctcccgggacttcgtggaggacgacttcgccggtgtggtccgggacgacgtgaccctgttcatcagcgcggtccaggaccaggtggtgccggacaacaccctggcctgggtgtgggtgcgcggcctggacgagctgtacgccgagtggtcggaggtcgtgtccacgaacttccgggacgcctccgggccggccatgaccgagatcggcgagcagccgtgggggcgggagttcgccctgcgcgacccggccggcaactgcgtgcacttcgtggccgaggagcaggactgacacgtgctaaaacttcatttttaatttaaaaggatctaggtgaagatcctttttgataatctcatgaccaaaatcccttaacgtgagttttcgttccactgagcgtcagaccccgtagaaaagatcaaaggatcttcttgagatcctttttttctgcgcgtaatctgctgcttgcaaacaaaaaaaccaccgctaccagcggtggtttgtttgccggatcaagagctaccaactctttttccgaaggtaactggcttcagcagagcgcagataccaaatactgtccttctagtgtagccgtagttaggccaccacttcaagaactctgtagcaccgcctacatacctcgctctgctaatcctgttaccagtggctgctgccagtggcgataagtcgtgtcttaccgggttggactcaagacgatagttaccggataaggcgcagcggtcgggctgaacggggggttcgtgcacacagcccagcttggagcgaacgacctacaccgaactgagatacctacagcgtgagctatgagaaagcgccacgcttcccgaagggagaaaggcggacaggtatccggtaagcggcagggtcggaacaggagagcgcacgagggagcttccagggggaaacgcctggtatctttatagtcctgtcgggtttcgccacctctgacttgagcgtcgatttttgtgatgctcgtcaggggggcggagcctatggaaaaacgccagcaacgcggcctttttacggttcctgggcttttgctggccttttgctcacatgttctttcctgcgttatcccctgattctgtggataaccgtattaccgcctttgagtgagctgataccgctcgccgcagccgaacgaccgagcgcagcgagtcagtgagcgaggaagcggaagagcgcccaatacgcaaaccgcctctccccgcgcgttggccgattcattaatgcagctggcacgacaggtttcccgactggaaagcgggcagtgagcgcaacgcaattaatgtgagttagctcactcattaggcaccccaggctttacactttatgcttccggctcgtatgttgtgtggaattgtgagcggataacaatttcacacaggaaacagctatgaccatgattacgccaagctatttaggtgacactatagaatactcaagctatgcatc

SEQ ID NO: 50 - DNA, 5284 bp, Artificial Sequence
  Synthetic DNA vector
aagcttggtctaatacccaatctctcgtcttatccagatgttttatacgccttaattaaggtgcgtttttatgcttgtagtattgtataatgtttttaagatcctagggataacagggtaatgagctcggatccactagttcgggggatctggattttagtactggattttggttttaggaattagaaattttattgatagaagtattttacaaatacaaatacatactaagggtttcttatatgctcaacacatgagcgaaaccctataggaaccctaattcccttatctgggaactactcacacattattatggagaaactcgagtcaaatctcggtgacgggcaggaccggacggggcggtaccggcaggctgaagtccagctgccagaaacccacgtcatgccagttcccgtgcttgaagccggccgcccgcagcatgccgcggggggcatatccgagcgcctcgtgcatgcgcacgctcgggtcgttgggcagcccgatgacagcgaccacgctcttgaagccctgtgcctccagggacttcagcaggtgggtgtagagcgtggagcccagtcccgtccgctggtggcggggggagacgtacacggtcgactcggccgtccagtcgtaggcgttgcgtgccttccaggggcccgcgtaggcgatgccggcgacctcgccgtccacctcggcgacgagccagggatagcgctcccgcagacggacgaggtcgtccgtccactcctgcggttcctgcggctcggtacggaagttgaccgtgcttgtctcgatgtagtggttgacgatggtgcagaccgccggcatgtccgcctcggtggcacggcggatgtcggccgggcgtcgttctgggctcatggtagactcgagagagatagatttgtagagagagactggtgatttcagcgtgtcctctccaaatgaaatgaacttccttatatagaggaaggtcttgcgaaggatagtgggattgtgcgtcatcccttacgtcagtggagatatcacatcaatccacttgctttgaagacgtggttggaacgtcttctttttccacgatgctcctcgtgggtgggggtccatctttgggaccactgtcggcagaggcatcttgaacgatagcctttcctttatcgcaatgatggcatttgtaggtgccaccttccttttctactgtccttttgatgaagtgacagatagctgggcaatggaatccgaggaggtttcccgatattaccctttgttgaaaagtctcaatagccctttggtcttctgagactgtatctttgatattcttggagtagacgagagtgtcgtgctccaccatgttatcacatcaatccacttgctttgaagacgtggttggaacgtcttctttttccacgatgctcctcgtgggtgggggtccatctttgggaccactgtcggcagaggcatcttgaacgatagcctttcctttatcgcaatgatggcatttgtaggtgccaccttccttttctactgtccttttgatgaagtgacagatagctgggcaatggaatccgaggaggtttcccgatattaccctttgttgaaaagtctcaatagccctttggtcttctgagactgtatctttgatattcttggagtagacgagagtgtcgtgctccaccatgttggcaagctgctctagccaatacgcaaaccgcctctccccgcgcgttggccgattcattaatgcagctggcacgacaggtttcccgactggaaagcgggcagtgagcgcaacgcaattaatgtgagttagctcactcattaggcaccccagcggccgcggtatcactagtattacagaggtaagttataacagtcgcctaacctctagagggcccaattcgccctatagtgagtcgtattacaattcactggccgtcgttttacaacgtcgtgactgggaaaaccctggcgttacccaacttaatcgccttgcagcacatccccctttcgccagctggcgtaatagcgaagaggcccgcaccgatcgcccttcccaacagttgcgcagcctatacgtacggcagtttaaggtttacacctataaaagagagagccgttatcgtctgtttgtggatgtacagagtgatattattgacacgccggggcgacggatggtgatccccctggccagtgcacgtctgctgtcagataaagtctcccgtgaactttacccggtggtgcatatcggggatgaaagctggcgcatgatgaccaccgatatggccagtgtgccggtctccgttatcggggaagaagtggctgatctcagccaccgcgaaaatgacatcaaaaacgccattaacctgatgttctggggaatataaatgtcaggcatgagattatcaaaaaggatcttcacctagatccttttcacgtagaaagccagtccgcagaaacggtgctgaccccggatgaatgtcagctactgggctatctggacaagggaaaacgcaagcgcaaagagaaagcaggtagcttgcagtgggcttacatggcgatagctagactgggcggttttatggacagcaagcgaaccggaattgccagctggggcgccctctggtaaggttgggaagccctgcaaagtaaactggatggctttctcgccgccaaggatctgatggcgcaggggatcaagctctgatcaagagacaggatgaggatcgtttcgcatgattgaacaagatggattgcacgcaggttctccggccgcttgggtggagaggctattcggctatgactgggcacaacagacaatcggctgctctgatgccgccgtgttccggctgtcagcgcaggggcgcccggttctttttgtcaagaccgacctgtccggtgccctgaatgaactgcaagacgaggcagcgcggctatcgtggctggccacgacgggcgttccttgcgcagctgtgctcgacgttgtcactgaagcgggaagggactggctgctattgggcgaagtgccggggcaggatctcctgtcatctcaccttgctcctgccgagaaagtatccatcatggctgatgcaatgcggcggctgcatacgcttgatccggctacctgcccattcgaccaccaagcgaaacatcgcatcgagcgagcacgtactcggatggaagccggtcttgtcgatcaggatgatctggacgaagagcatcaggggctcgcgccagccgaactgttcgccaggctcaaggcgagcatgcccgacggcgaggatctcgtcgtgacccatggcgatgcctgcttgccgaatatcatggtggaaaatggccgcttttctggattcatcgactgtggccggctgggtgtggcggaccgctatcaggacatagcgttggctacccgtgatattgctgaagagcttggcggcgaatgggctgaccgcttcctcgtgctttacggtatcgccgctcccgattcgcagcgcatcgccttctatcgccttcttgacgagttcttctgaattattaacgcttacaatttcctgatgcggtattttctccttacgcatctgtgcggtatttcacaccgcatacaggtggcacttttcggggaaatgtgcgcggaacccctatttgtttatttttctaaatacattcaaatatgtatccgctcatgagacaataaccctgataaatgcttcaataatagcacgtgaggagggccaccatggccaagttgaccagtgccgttccggtgctcaccgcgcgcgacgtcgccggagcggtcgagttctggaccgaccggctcgggttctcccgggacttcgtggaggacgacttcgccggtgtggtccgggacgacgtgaccctgttcatcagcgcggtccaggaccaggtggtgccggacaacaccctggcctgggtgtgggtgcgcggcctggacgagctgtacgccgagtggtcggaggtcgtgtccacgaacttccgggacgcctccgggccggccatgaccgagatcggcgagcagccgtgggggcgggagttcgccctgcgcgacccggccggcaactgcgtgcacttcgtggccgaggagcaggactgacacgtgctaaaacttcatttttaatttaaaaggatctaggtgaagatcctttttgataatctcatgaccaaaatcccttaacgtgagttttcgttccactgagcgtcagaccccgtagaaaagatcaaaggatcttcttgagatcctttttttctgcgcgtaatctgctgcttgcaaacaaaaaaaccaccgctaccagcggtggtttgtttgccggatcaagagctaccaactctttttccgaaggtaactggcttcagcagagcgcagataccaaatactgtccttctagtgtagccgtagttaggccaccacttcaagaactctgtagcaccgcctacatacctcgctctgctaatcctgttaccagtggctgctgccagtggcgataagtcgtgtcttaccgggttggactcaagacgatagttaccggataaggcgcagcggtcgggctgaacggggggttcgtgcacacagcccagcttggagcgaacgacctacaccgaactgagatacctacagcgtgagctatgagaaagcgccacgcttcccgaagggagaaaggcggacaggtatccggtaagcggcagggtcggaacaggagagcgcacgagggagcttccagggggaaacgcctggtatctttatagtcctgtcgggtttcgccacctctgacttgagcgtcgatttttgtgatgctcgtcaggggggcggagcctatggaaaaacgccagcaacgcggcctttttacggttcctgggcttttgctggccttttgctcacatgttctttcctgcgttatcccctgattctgtggataaccgtattaccgcctttgagtgagctgataccgctcgccgcagccgaacgaccgagcgcagcgagtcagtgagcgaggaagcggaagagcgcccaatacgcaaaccgcctctccccgcgcgttggccgattcattaatgcagctggcacgacaggtttcccgactggaaagcgggcagtgagcgcaacgcaattaatgtgagttagctcactcattaggcaccccaggctttacactttatgcttccggctcgtatgttgtgtggaattgtgagcggataacaatttcacacaggaaacagctatgaccatgattacgccaagctatttaggtgacactatagaatactcaagctatgcatc

SEQ ID NO: 51 - DNA, 5284 bp, Artificial Sequence
  Synthetic DNA vector
aagcttggtgaattcccttatgtgagtgtaaaaggcaggcgagtttgtcccttaattaaggtgcgtttttatgcttgtagtattgtataatgtttttaagatcctagggataacagggtaatgagctcggatccactagttcgggggatctggattttagtactggattttggttttaggaattagaaattttattgatagaagtattttacaaatacaaatacatactaagggtttcttatatgctcaacacatgagcgaaaccctataggaaccctaattcccttatctgggaactactcacacattattatggagaaactcgagtcaaatctcggtgacgggcaggaccggacggggcggtaccggcaggctgaagtccagctgccagaaacccacgtcatgccagttcccgtgcttgaagccggccgcccgcagcatgccgcggggggcatatccgagcgcctcgtgcatgcgcacgctcgggtcgttgggcagcccgatgacagcgaccacgctcttgaagccctgtgcctccagggacttcagcaggtgggtgtagagcgtggagcccagtcccgtccgctggtggcggggggagacgtacacggtcgactcggccgtccagtcgtaggcgttgcgtgccttccaggggcccgcgtaggcgatgccggcgacctcgccgtccacctcggcgacgagccagggatagcgctcccgcagacggacgaggtcgtccgtccactcctgcggttcctgcggctcggtacggaagttgaccgtgcttgtctcgatgtagtggttgacgatggtgcagaccgccggcatgtccgcctcggtggcacggcggatgtcggccgggcgtcgttctgggctcatggtagactcgagagagatagatttgtagagagagactggtgatttcagcgtgtcctctccaaatgaaatgaacttccttatatagaggaaggtcttgcgaaggatagtgggattgtgcgtcatcccttacgtcagtggagatatcacatcaatccacttgctttgaagacgtggttggaacgtcttctttttccacgatgctcctcgtgggtgggggtccatctttgggaccactgtcggcagaggcatcttgaacgatagcctttcctttatcgcaatgatggcatttgtaggtgccaccttccttttctactgtccttttgatgaagtgacagatagctgggcaatggaatccgaggaggtttcccgatattaccctttgttgaaaagtctcaatagccctttggtcttctgagactgtatctttgatattcttggagtagacgagagtgtcgtgctccaccatgttatcacatcaatccacttgctttgaagacgtggttggaacgtcttctttttccacgatgctcctcgtgggtgggggtccatctttgggaccactgtcggcagaggcatcttgaacgatagcctttcctttatcgcaatgatggcatttgtaggtgccaccttccttttctactgtccttttgatgaagtgacagatagctgggcaatggaatccgaggaggtttcccgatattaccctttgttgaaaagtctcaatagccctttggtcttctgagactgtatctttgatattcttggagtagacgagagtgtcgtgctccaccatgttggcaagctgctctagccaatacgcaaaccgcctctccccgcgcgttggccgattcattaatgcagctggcacgacaggtttcccgactggaaagcgggcagtgagcgcaacgcaattaatgtgagttagctcactcattaggcaccccagcggccgcggtatcactagtattacagaggtaagttataacagtcgcctaacctctagagggcccaattcgccctatagtgagtcgtattacaattcactggccgtcgttttacaacgtcgtgactgggaaaaccctggcgttacccaacttaatcgccttgcagcacatccccctttcgccagctggcgtaatagcgaagaggcccgcaccgatcgcccttcccaacagttgcgcagcctatacgtacggcagtttaaggtttacacctataaaagagagagccgttatcgtctgtttgtggatgtacagagtgatattattgacacgccggggcgacggatggtgatccccctggccagtgcacgtctgctgtcagataaagtctcccgtgaactttacccggtggtgcatatcggggatgaaagctggcgcatgatgaccaccgatatggccagtgtgccggtctccgttatcggggaagaagtggctgatctcagccaccgcgaaaatgacatcaaaaacgccattaacctgatgttctggggaatataaatgtcaggcatgagattatcaaaaaggatcttcacctagatccttttcacgtagaaagccagtccgcagaaacggtgctgaccccggatgaatgtcagctactgggctatctggacaagggaaaacgcaagcgcaaagagaaagcaggtagcttgcagtgggcttacatggcgatagctagactgggcggttttatggacagcaagcgaaccggaattgccagctggggcgccctctggtaaggttgggaagccctgcaaagtaaactggatggctttctcgccgccaaggatctgatggcgcaggggatcaagctctgatcaagagacaggatgaggatcgtttcgcatgattgaacaagatggattgcacgcaggttctccggccgcttgggtggagaggctattcggctatgactgggcacaacagacaatcggctgctctgatgccgccgtgttccggctgtcagcgcaggggcgcccggttctttttgtcaagaccgacctgtccggtgccctgaatgaactgcaagacgaggcagcgcggctatcgtggctggccacgacgggcgttccttgcgcagctgtgctcgacgttgtcactgaagcgggaagggactggctgctattgggcgaagtgccggggcaggatctcctgtcatctcaccttgctcctgccgagaaagtatccatcatggctgatgcaatgcggcggctgcatacgcttgatccggctacctgcccattcgaccaccaagcgaaacatcgcatcgagcgagcacgtactcggatggaagccggtcttgtcgatcaggatgatctggacgaagagcatcaggggctcgcgccagccgaactgttcgccaggctcaaggcgagcatgcccgacggcgaggatctcgtcgtgacccatggcgatgcctgcttgccgaatatcatggtggaaaatggccgcttttctggattcatcgactgtggccggctgggtgtggcggaccgctatcaggacatagcgttggctacccgtgatattgctgaagagcttggcggcgaatgggctgaccgcttcctcgtgctttacggtatcgccgctcccgattcgcagcgcatcgccttctatcgccttcttgacgagttcttctgaattattaacgcttacaatttcctgatgcggtattttctccttacgcatctgtgcggtatttcacaccgcatacaggtggcacttttcggggaaatgtgcgcggaacccctatttgtttatttttctaaatacattcaaatatgtatccgctcatgagacaataaccctgataaatgcttcaataatagcacgtgaggagggccaccatggccaagttgaccagtgccgttccggtgctcaccgcgcgcgacgtcgccggagcggtcgagttctggaccgaccggctcgggttctcccgggacttcgtggaggacgacttcgccggtgtggtccgggacgacgtgaccctgttcatcagcgcggtccaggaccaggtggtgccggacaacaccctggcctgggtgtgggtgcgcggcctggacgagctgtacgccgagtggtcggaggtcgtgtccacgaacttccgggacgcctccgggccggccatgaccgagatcggcgagcagccgtgggggcgggagttcgccctgcgcgacccggccggcaactgcgtgcacttcgtggccgaggagcaggactgacacgtgctaaaacttcatttttaatttaaaaggatctaggtgaagatcctttttgataatctcatgaccaaaatcccttaacgtgagttttcgttccactgagcgtcagaccccgtagaaaagatcaaaggatcttcttgagatcctttttttctgcgcgtaatctgctgcttgcaaacaaaaaaaccaccgctaccagcggtggtttgtttgccggatcaagagctaccaactctttttccgaaggtaactggcttcagcagagcgcagataccaaatactgtccttctagtgtagccgtagttaggccaccacttcaagaactctgtagcaccgcctacatacctcgctctgctaatcctgttaccagtggctgctgccagtggcgataagtcgtgtcttaccgggttggactcaagacgatagttaccggataaggcgcagcggtcgggctgaacggggggttcgtgcacacagcccagcttggagcgaacgacctacaccgaactgagatacctacagcgtgagctatgagaaagcgccacgcttcccgaagggagaaaggcggacaggtatccggtaagcggcagggtcggaacaggagagcgcacgagggagcttccagggggaaacgcctggtatctttatagtcctgtcgggtttcgccacctctgacttgagcgtcgatttttgtgatgctcgtcaggggggcggagcctatggaaaaacgccagcaacgcggcctttttacggttcctgggcttttgctggccttttgctcacatgttctttcctgcgttatcccctgattctgtggataaccgtattaccgcctttgagtgagctgataccgctcgccgcagccgaacgaccgagcgcagcgagtcagtgagcgaggaagcggaagagcgcccaatacgcaaaccgcctctccccgcgcgttggccgattcattaatgcagctggcacgacaggtttcccgactggaaagcgggcagtgagcgcaacgcaattaatgtgagttagctcactcattaggcaccccaggctttacactttatgcttccggctcgtatgttgtgtggaattgtgagcggataacaatttcacacaggaaacagctatgaccatgattacgccaagctatttaggtgacactatagaatactcaagctatgcatc

SEQ ID NO: 52 - DNA, 5284 bp, Artificial Sequence
  Synthetic DNA vector
aagcttggtagataagttgatttagccataaaatattgtttccgtgaccccttaattaaggtgcgtttttatgcttgtagtattgtataatgtttttaagatcctagggataacagggtaatgagctcggatccactagttcgggggatctggattttagtactggattttggttttaggaattagaaattttattgatagaagtattttacaaatacaaatacatactaagggtttcttatatgctcaacacatgagcgaaaccctataggaaccctaattcccttatctgggaactactcacacattattatggagaaactcgagtcaaatctcggtgacgggcaggaccggacggggcggtaccggcaggctgaagtccagctgccagaaacccacgtcatgccagttcccgtgcttgaagccggccgcccgcagcatgccgcggggggcatatccgagcgcctcgtgcatgcgcacgctcgggtcgttgggcagcccgatgacagcgaccacgctcttgaagccctgtgcctccagggacttcagcaggtgggtgtagagcgtggagcccagtcccgtccgctggtggcggggggagacgtacacggtcgactcggccgtccagtcgtaggcgttgcgtgccttccaggggcccgcgtaggcgatgccggcgacctcgccgtccacctcggcgacgagccagggatagcgctcccgcagacggacgaggtcgtccgtccactcctgcggttcctgcggctcggtacggaagttgaccgtgcttgtctcgatgtagtggttgacgatggtgcagaccgccggcatgtccgcctcggtggcacggcggatgtcggccgggcgtcgttctgggctcatggtagactcgagagagatagatttgtagagagagactggtgatttcagcgtgtcctctccaaatgaaatgaacttccttatatagaggaaggtcttgcgaaggatagtgggattgtgcgtcatcccttacgtcagtggagatatcacatcaatccacttgctttgaagacgtggttggaacgtcttctttttccacgatgctcctcgtgggtgggggtccatctttgggaccactgtcggcagaggcatcttgaacgatagcctttcctttatcgcaatgatggcatttgtaggtgccaccttccttttctactgtccttttgatgaagtgacagatagctgggcaatggaatccgaggaggtttcccgatattaccctttgttgaaaagtctcaatagccctttggtcttctgagactgtatctttgatattcttggagtagacgagagtgtcgtgctccaccatgttatcacatcaatccacttgctttgaagacgtggttggaacgtcttctttttccacgatgctcctcgtgggtgggggtccatctttgggaccactgtcggcagaggcatcttgaacgatagcctttcctttatcgcaatgatggcatttgtaggtgccaccttccttttctactgtccttttgatgaagtgacagatagctgggcaatggaatccgaggaggtttcccgatattaccctttgttgaaaagtctcaatagccctttggtcttctgagactgtatctttgatattcttggagtagacgagagtgtcgtgctccaccatgttggcaagctgctctagccaatacgcaaaccgcctctccccgcgcgttggccgattcattaatgcagctggcacgacaggtttcccgactggaaagcgggcagtgagcgcaacgcaattaatgtgagttagctcactcattaggcaccccagcggccgcggtatcactagtattacagaggtaagttataacagtcgcctaacctctagagggcccaattcgccctatagtgagtcgtattacaattcactggccgtcgttttacaacgtcgtgactgggaaaaccctggcgttacccaacttaatcgccttgcagcacatccccctttcgccagctggcgtaatagcgaagaggcccgcaccgatcgcccttcccaacagttgcgcagcctatacgtacggcagtttaaggtttacacctataaaagagagagccgttatcgtctgtttgtggatgtacagagtgatattattgacacgccggggcgacggatggtgatccccctggccagtgcacgtctgctgtcagataaagtctcccgtgaactttacccggtggtgcatatcggggatgaaagctggcgcatgatgaccaccgatatggccagtgtgccggtctccgttatcggggaagaagtggctgatctcagccaccgcgaaaatgacatcaaaaacgccattaacctgatgttctggggaatataaatgtcaggcatgagattatcaaaaaggatcttcacctagatccttttcacgtagaaagccagtccgcagaaacggtgctgaccccggatgaatgtcagctactgggctatctggacaagggaaaacgcaagcgcaaagagaaagcaggtagcttgcagtgggcttacatggcgatagctagactgggcggttttatggacagcaagcgaaccggaattgccagctggggcgccctctggtaaggttgggaagccctgcaaagtaaactggatggctttctcgccgccaaggatctgatggcgcaggggatcaagctctgatcaagagacaggatgaggatcgtttcgcatgattgaacaagatggattgcacgcaggttctccggccgcttgggtggagaggctattcggctatgactgggcacaacagacaatcggctgctctgatgccgccgtgttccggctgtcagcgcaggggcgcccggttctttttgtcaagaccgacctgtccggtgccctgaatgaactgcaagacgaggcagcgcggctatcgtggctggccacgacgggcgttccttgcgcagctgtgctcgacgttgtcactgaagcgggaagggactggctgctattgggcgaagtgccggggcaggatctcctgtcatctcaccttgctcctgccgagaaagtatccatcatggctgatgcaatgcggcggctgcatacgcttgatccggctacctgcccattcgaccaccaagcgaaacatcgcatcgagcgagcacgtactcggatggaagccggtcttgtcgatcaggatgatctggacgaagagcatcaggggctcgcgccagccgaactgttcgccaggctcaaggcgagcatgcccgacggcgaggatctcgtcgtgacccatggcgatgcctgcttgccgaatatcatggtggaaaatggccgcttttctggattcatcgactgtggccggctgggtgtggcggaccgctatcaggacatagcgttggctacccgtgatattgctgaagagcttggcggcgaatgggctgaccgcttcctcgtgctttacggtatcgccgctcccgattcgcagcgcatcgccttctatcgccttcttgacgagttcttctgaattattaacgcttacaatttcctgatgcggtattttctccttacgcatctgtgcggtatttcacaccgcatacaggtggcacttttcggggaaatgtgcgcggaacccctatttgtttatttttctaaatacattcaaatatgtatccgctcatgagacaataaccctgataaatgcttcaataatagcacgtgaggagggccaccatggccaagttgaccagtgccgttccggtgctcaccgcgcgcgacgtcgccggagcggtcgagttctggaccgaccggctcgggttctcccgggacttcgtggaggacgacttcgccggtgtggtccgggacgacgtgaccctgttcatcagcgcggtccaggaccaggtggtgccggacaacaccctggcctgggtgtgggtgcgcggcctggacgagctgtacgccgagtggtcggaggtcgtgtccacgaacttccgggacgcctccgggccggccatgaccgagatcggcgagcagccgtgggggcgggagttcgccctgcgcgacccggccggcaactgcgtgcacttcgtggccgaggagcaggactgacacgtgctaaaacttcatttttaatttaaaaggatctaggtgaagatcctttttgataatctcatgaccaaaatcccttaacgtgagttttcgttccactgagcgtcagaccccgtagaaaagatcaaaggatcttcttgagatcctttttttctgcgcgtaatctgctgcttgcaaacaaaaaaaccaccgctaccagcggtggtttgtttgccggatcaagagctaccaactctttttccgaaggtaactggcttcagcagagcgcagataccaaatactgtccttctagtgtagccgtagttaggccaccacttcaagaactctgtagcaccgcctacatacctcgctctgctaatcctgttaccagtggctgctgccagtggcgataagtcgtgtcttaccgggttggactcaagacgatagttaccggataaggcgcagcggtcgggctgaacggggggttcgtgcacacagcccagcttggagcgaacgacctacaccgaactgagatacctacagcgtgagctatgagaaagcgccacgcttcccgaagggagaaaggcggacaggtatccggtaagcggcagggtcggaacaggagagcgcacgagggagcttccagggggaaacgcctggtatctttatagtcctgtcgggtttcgccacctctgacttgagcgtcgatttttgtgatgctcgtcaggggggcggagcctatggaaaaacgccagcaacgcggcctttttacggttcctgggcttttgctggccttttgctcacatgttctttcctgcgttatcccctgattctgtggataaccgtattaccgcctttgagtgagctgataccgctcgccgcagccgaacgaccgagcgcagcgagtcagtgagcgaggaagcggaagagcgcccaatacgcaaaccgcctctccccgcgcgttggccgattcattaatgcagctggcacgacaggtttcccgactggaaagcgggcagtgagcgcaacgcaattaatgtgagttagctcactcattaggcaccccaggctttacactttatgcttccggctcgtatgttgtgtggaattgtgagcggataacaatttcacacaggaaacagctatgaccatgattacgccaagctatttaggtgacactatagaatactcaagctatgcatc

SEQ ID NO: 53 - DNA, 5284 bp, Artificial Sequence
  Synthetic DNA vector
aagcttggttctgagtcacggcttcattggcattccgtacaacgaacgtccttaattaaggtgcgtttttatgcttgtagtattgtataatgtttttaagatcctagggataacagggtaatgagctcggatccactagttcgggggatctggattttagtactggattttggttttaggaattagaaattttattgatagaagtattttacaaatacaaatacatactaagggtttcttatatgctcaacacatgagcgaaaccctataggaaccctaattcccttatctgggaactactcacacattattatggagaaactcgagtcaaatctcggtgacgggcaggaccggacggggcggtaccggcaggctgaagtccagctgccagaaacccacgtcatgccagttcccgtgcttgaagccggccgcccgcagcatgccgcggggggcatatccgagcgcctcgtgcatgcgcacgctcgggtcgttgggcagcccgatgacagcgaccacgctcttgaagccctgtgcctccagggacttcagcaggtgggtgtagagcgtggagcccagtcccgtccgctggtggcggggggagacgtacacggtcgactcggccgtccagtcgtaggcgttgcgtgccttccaggggcccgcgtaggcgatgccggcgacctcgccgtccacctcggcgacgagccagggatagcgctcccgcagacggacgaggtcgtccgtccactcctgcggttcctgcggctcggtacggaagttgaccgtgcttgtctcgatgtagtggttgacgatggtgcagaccgccggcatgtccgcctcggtggcacggcggatgtcggccgggcgtcgttctgggctcatggtagactcgagagagatagatttgtagagagagactggtgatttcagcgtgtcctctccaaatgaaatgaacttccttatatagaggaaggtcttgcgaaggatagtgggattgtgcgtcatcccttacgtcagtggagatatcacatcaatccacttgctttgaagacgtggttggaacgtcttctttttccacgatgctcctcgtgggtgggggtccatctttgggaccactgtcggcagaggcatcttgaacgatagcctttcctttatcgcaatgatggcatttgtaggtgccaccttccttttctactgtccttttgatgaagtgacagatagctgggcaatggaatccgaggaggtttcccgatattaccctttgttgaaaagtctcaatagccctttggtcttctgagactgtatctttgatattcttggagtagacgagagtgtcgtgctccaccatgttatcacatcaatccacttgctttgaagacgtggttggaacgtcttctttttccacgatgctcctcgtgggtgggggtccatctttgggaccactgtcggcagaggcatcttgaacgatagcctttcctttatcgcaatgatggcatttgtaggtgccaccttccttttctactgtccttttgatgaagtgacagatagctgggcaatggaatccgaggaggtttcccgatattaccctttgttgaaaagtctcaatagccctttggtcttctgagactgtatctttgatattcttggagtagacgagagtgtcgtgctccaccatgttggcaagctgctctagccaatacgcaaaccgcctctccccgcgcgttggccgattcattaatgcagctggcacgacaggtttcccgactggaaagcgggcagtgagcgcaacgcaattaatgtgagttagctcactcattaggcaccccagcggccgcggtatcactagtattacagaggtaagttataacagtcgcctaacctctagagggcccaattcgccctatagtgagtcgtattacaattcactggccgtcgttttacaacgtcgtgactgggaaaaccctggcgttacccaacttaatcgccttgcagcacatccccctttcgccagctggcgtaatagcgaagaggcccgcaccgatcgcccttcccaacagttgcgcagcctatacgtacggcagtttaaggtttacacctataaaagagagagccgttatcgtctgtttgtggatgtacagagtgatattattgacacgccggggcgacggatggtgatccccctggccagtgcacgtctgctgtcagataaagtctcccgtgaactttacccggtggtgcatatcggggatgaaagctggcgcatgatgaccaccgatatggccagtgtgccggtctccgttatcggggaagaagtggctgatctcagccaccgcgaaaatgacatcaaaaacgccattaacctgatgttctggggaatataaatgtcaggcatgagattatcaaaaaggatcttcacctagatccttttcacgtagaaagccagtccgcagaaacggtgctgaccccggatgaatgtcagctactgggctatctggacaagggaaaacgcaagcgcaaagagaaagcaggtagcttgcagtgggcttacatggcgatagctagactgggcggttttatggacagcaagcgaaccggaattgccagctggggcgccctctggtaaggttgggaagccctgcaaagtaaactggatggctttctcgccgccaaggatctgatggcgcaggggatcaagctctgatcaagagacaggatgaggatcgtttcgcatgattgaacaagatggattgcacgcaggttctccggccgcttgggtggagaggctattcggctatgactgggcacaacagacaatcggctgctctgatgccgccgtgttccggctgtcagcgcaggggcgcccggttctttttgtcaagaccgacctgtccggtgccctgaatgaactgcaagacgaggcagcgcggctatcgtggctggccacgacgggcgttccttgcgcagctgtgctcgacgttgtcactgaagcgggaagggactggctgctattgggcgaagtgccggggcaggatctcctgtcatctcaccttgctcctgccgagaaagtatccatcatggctgatgcaatgcggcggctgcatacgcttgatccggctacctgcccattcgaccaccaagcgaaacatcgcatcgagcgagcacgtactcggatggaagccggtcttgtcgatcaggatgatctggacgaagagcatcaggggctcgcgccagccgaactgttcgccaggctcaaggcgagcatgcccgacggcgaggatctcgtcgtgacccatggcgatgcctgcttgccgaatatcatggtggaaaatggccgcttttctggattcatcgactgtggccggctgggtgtggcggaccgctatcaggacatagcgttggctacccgtgatattgctgaagagcttggcggcgaatgggctgaccgcttcctcgtgctttacggtatcgccgctcccgattcgcagcgcatcgccttctatcgccttcttgacgagttcttctgaattattaacgcttacaatttcctgatgcggtattttctccttacgcatctgtgcggtatttcacaccgcatacaggtggcacttttcggggaaatgtgcgcggaacccctatttgtttatttttctaaatacattcaaatatgtatccgctcatgagacaataaccctgataaatgcttcaataatagcacgtgaggagggccaccatggccaagttgaccagtgccgttccggtgctcaccgcgcgcgacgtcgccggagcggtcgagttctggaccgaccggctcgggttctcccgggacttcgtggaggacgacttcgccggtgtggtccgggacgacgtgaccctgttcatcagcgcggtccaggaccaggtggtgccggacaacaccctggcctgggtgtgggtgcgcggcctggacgagctgtacgccgagtggtcggaggtcgtgtccacgaacttccgggacgcctccgggccggccatgaccgagatcggcgagcagccgtgggggcgggagttcgccctgcgcgacccggccggcaactgcgtgcacttcgtggccgaggagcaggactgacacgtgctaaaacttcatttttaatttaaaaggatctaggtgaagatcctttttgataatctcatgaccaaaatcccttaacgtgagttttcgttccactgagcgtcagaccccgtagaaaagatcaaaggatcttcttgagatcctttttttctgcgcgtaatctgctgcttgcaaacaaaaaaaccaccgctaccagcggtggtttgtttgccggatcaagagctaccaactctttttccgaaggtaactggcttcagcagagcgcagataccaaatactgtccttctagtgtagccgtagttaggccaccacttcaagaactctgtagcaccgcctacatacctcgctctgctaatcctgttaccagtggctgctgccagtggcgataagtcgtgtcttaccgggttggactcaagacgatagttaccggataaggcgcagcggtcgggctgaacggggggttcgtgcacacagcccagcttggagcgaacgacctacaccgaactgagatacctacagcgtgagctatgagaaagcgccacgcttcccgaagggagaaaggcggacaggtatccggtaagcggcagggtcggaacaggagagcgcacgagggagcttccagggggaaacgcctggtatctttatagtcctgtcgggtttcgccacctctgacttgagcgtcgatttttgtgatgctcgtcaggggggcggagcctatggaaaaacgccagcaacgcggcctttttacggttcctgggcttttgctggccttttgctcacatgttctttcctgcgttatcccctgattctgtggataaccgtattaccgcctttgagtgagctgataccgctcgccgcagccgaacgaccgagcgcagcgagtcagtgagcgaggaagcggaagagcgcccaatacgcaaaccgcctctccccgcgcgttggccgattcattaatgcagctggcacgacaggtttcccgactggaaagcgggcagtgagcgcaacgcaattaatgtgagttagctcactcattaggcaccccaggctttacactttatgcttccggctcgtatgttgtgtggaattgtgagcggataacaatttcacacaggaaacagctatgaccatgattacgccaagctatttaggtgacactatagaatactcaagctatgcatc

SEQ ID NO: 54 - DNA, 5284 bp, Artificial Sequence
  Synthetic DNA vector
aagcttggtcctcagagagcctatagcggtaaaacaacaccatgcatccccttaattaaggtgcgtttttatgcttgtagtattgtataatgtttttaagatcctagggataacagggtaatgagctcggatccactagttcgggggatctggattttagtactggattttggttttaggaattagaaattttattgatagaagtattttacaaatacaaatacatactaagggtttcttatatgctcaacacatgagcgaaaccctataggaaccctaattcccttatctgggaactactcacacattattatggagaaactcgagtcaaatctcggtgacgggcaggaccggacggggcggtaccggcaggctgaagtccagctgccagaaacccacgtcatgccagttcccgtgcttgaagccggccgcccgcagcatgccgcggggggcatatccgagcgcctcgtgcatgcgcacgctcgggtcgttgggcagcccgatgacagcgaccacgctcttgaagccctgtgcctccagggacttcagcaggtgggtgtagagcgtggagcccagtcccgtccgctggtggcggggggagacgtacacggtcgactcggccgtccagtcgtaggcgttgcgtgccttccaggggcccgcgtaggcgatgccggcgacctcgccgtccacctcggcgacgagccagggatagcgctcccgcagacggacgaggtcgtccgtccactcctgcggttcctgcggctcggtacggaagttgaccgtgcttgtctcgatgtagtggttgacgatggtgcagaccgccggcatgtccgcctcggtggcacggcggatgtcggccgggcgtcgttctgggctcatggtagactcgagagagatagatttgtagagagagactggtgatttcagcgtgtcctctccaaatgaaatgaacttccttatatagaggaaggtcttgcgaaggatagtgggattgtgcgtcatcccttacgtcagtggagatatcacatcaatccacttgctttgaagacgtggttggaacgtcttctttttccacgatgctcctcgtgggtgggggtccatctttgggaccactgtcggcagaggcatcttgaacgatagcctttcctttatcgcaatgatggcatttgtaggtgccaccttccttttctactgtccttttgatgaagtgacagatagctgggcaatggaatccgaggaggtttcccgatattaccctttgttgaaaagtctcaatagccctttggtcttctgagactgtatctttgatattcttggagtagacgagagtgtcgtgctccaccatgttatcacatcaatccacttgctttgaagacgtggttggaacgtcttctttttccacgatgctcctcgtgggtgggggtccatctttgggaccactgtcggcagaggcatcttgaacgatagcctttcctttatcgcaatgatggcatttgtaggtgccaccttccttttctactgtccttttgatgaagtgacagatagctgggcaatggaatccgaggaggtttcccgatattaccctttgttgaaaagtctcaatagccctttggtcttctgagactgtatctttgatattcttggagtagacgagagtgtcgtgctccaccatgttggcaagctgctctagccaatacgcaaaccgcctctccccgcgcgttggccgattcattaatgcagctggcacgacaggtttcccgactggaaagcgggcagtgagcgcaacgcaattaatgtgagttagctcactcattaggcaccccagcggccgcggtatcactagtattacagaggtaagttataacagtcgcctaacctctagagggcccaattcgccctatagtgagtcgtattacaattcactggccgtcgttttacaacgtcgtgactgggaaaaccctggcgttacccaacttaatcgccttgcagcacatccccctttcgccagctggcgtaatagcgaagaggcccgcaccgatcgcccttcccaacagttgcgcagcctatacgtacggcagtttaaggtttacacctataaaagagagagccgttatcgtctgtttgtggatgtacagagtgatattattgacacgccggggcgacggatggtgatccccctggccagtgcacgtctgctgtcagataaagtctcccgtgaactttacccggtggtgcatatcggggatgaaagctggcgcatgatgaccaccgatatggccagtgtgccggtctccgttatcggggaagaagtggctgatctcagccaccgcgaaaatgacatcaaaaacgccattaacctgatgttctggggaatataaatgtcaggcatgagattatcaaaaaggatcttcacctagatccttttcacgtagaaagccagtccgcagaaacggtgctgaccccggatgaatgtcagctactgggctatctggacaagggaaaacgcaagcgcaaagagaaagcaggtagcttgcagtgggcttacatggcgatagctagactgggcggttttatggacagcaagcgaaccggaattgccagctggggcgccctctggtaaggttgggaagccctgcaaagtaaactggatggctttctcgccgccaaggatctgatggcgcaggggatcaagctctgatcaagagacaggatgaggatcgtttcgcatgattgaacaagatggattgcacgcaggttctccggccgcttgggtggagaggctattcggctatgactgggcacaacagacaatcggctgctctgatgccgccgtgttccggctgtcagcgcaggggcgcccggttctttttgtcaagaccgacctgtccggtgccctgaatgaactgcaagacgaggcagcgcggctatcgtggctggccacgacgggcgttccttgcgcagctgtgctcgacgttgtcactgaagcgggaagggactggctgctattgggcgaagtgccggggcaggatctcctgtcatctcaccttgctcctgccgagaaagtatccatcatggctgatgcaatgcggcggctgcatacgcttgatccggctacctgcccattcgaccaccaagcgaaacatcgcatcgagcgagcacgtactcggatggaagccggtcttgtcgatcaggatgatctggacgaagagcatcaggggctcgcgccagccgaactgttcgccaggctcaaggcgagcatgcccgacggcgaggatctcgtcgtgacccatggcgatgcctgcttgccgaatatcatggtggaaaatggccgcttttctggattcatcgactgtggccggctgggtgtggcggaccgctatcaggacatagcgttggctacccgtgatattgctgaagagcttggcggcgaatgggctgaccgcttcctcgtgctttacggtatcgccgctcccgattcgcagcgcatcgccttctatcgccttcttgacgagttcttctgaattattaacgcttacaatttcctgatgcggtattttctccttacgcatctgtgcggtatttcacaccgcatacaggtggcacttttcggggaaatgtgcgcggaacccctatttgtttatttttctaaatacattcaaatatgtatccgctcatgagacaataaccctgataaatgcttcaataatagcacgtgaggagggccaccatggccaagttgaccagtgccgttccggtgctcaccgcgcgcgacgtcgccggagcggtcgagttctggaccgaccggctcgggttctcccgggacttcgtggaggacgacttcgccggtgtggtccgggacgacgtgaccctgttcatcagcgcggtccaggaccaggtggtgccggacaacaccctggcctgggtgtgggtgcgcggcctggacgagctgtacgccgagtggtcggaggtcgtgtccacgaacttccgggacgcctccgggccggccatgaccgagatcggcgagcagccgtgggggcgggagttcgccctgcgcgacccggccggcaactgcgtgcacttcgtggccgaggagcaggactgacacgtgctaaaacttcatttttaatttaaaaggatctaggtgaagatcctttttgataatctcatgaccaaaatcccttaacgtgagttttcgttccactgagcgtcagaccccgtagaaaagatcaaaggatcttcttgagatcctttttttctgcgcgtaatctgctgcttgcaaacaaaaaaaccaccgctaccagcggtggtttgtttgccggatcaagagctaccaactctttttccgaaggtaactggcttcagcagagcgcagataccaaatactgtccttctagtgtagccgtagttaggccaccacttcaagaactctgtagcaccgcctacatacctcgctctgctaatcctgttaccagtggctgctgccagtggcgataagtcgtgtcttaccgggttggactcaagacgatagttaccggataaggcgcagcggtcgggctgaacggggggttcgtgcacacagcccagcttggagcgaacgacctacaccgaactgagatacctacagcgtgagctatgagaaagcgccacgcttcccgaagggagaaaggcggacaggtatccggtaagcggcagggtcggaacaggagagcgcacgagggagcttccagggggaaacgcctggtatctttatagtcctgtcgggtttcgccacctctgacttgagcgtcgatttttgtgatgctcgtcaggggggcggagcctatggaaaaacgccagcaacgcggcctttttacggttcctgggcttttgctggccttttgctcacatgttctttcctgcgttatcccctgattctgtggataaccgtattaccgcctttgagtgagctgataccgctcgccgcagccgaacgaccgagcgcagcgagtcagtgagcgaggaagcggaagagcgcccaatacgcaaaccgcctctccccgcgcgttggccgattcattaatgcagctggcacgacaggtttcccgactggaaagcgggcagtgagcgcaacgcaattaatgtgagttagctcactcattaggcaccccaggctttacactttatgcttccggctcgtatgttgtgtggaattgtgagcggataacaatttcacacaggaaacagctatgaccatgattacgccaagctatttaggtgacactatagaatactcaagctatgcatc

SEQ ID NO: 55 - DNA, 5284 bp, Artificial Sequence
  Synthetic DNA vector
aagcttggtcgcagtcgcttcctgtaaatagagcattaaattccatagtccttaattaaggtgcgtttttatgcttgtagtattgtataatgtttttaagatcctagggataacagggtaatgagctcggatccactagttcgggggatctggattttagtactggattttggttttaggaattagaaattttattgatagaagtattttacaaatacaaatacatactaagggtttcttatatgctcaacacatgagcgaaaccctataggaaccctaattcccttatctgggaactactcacacattattatggagaaactcgagtcaaatctcggtgacgggcaggaccggacggggcggtaccggcaggctgaagtccagctgccagaaacccacgtcatgccagttcccgtgcttgaagccggccgcccgcagcatgccgcggggggcatatccgagcgcctcgtgcatgcgcacgctcgggtcgttgggcagcccgatgacagcgaccacgctcttgaagccctgtgcctccagggacttcagcaggtgggtgtagagcgtggagcccagtcccgtccgctggtggcggggggagacgtacacggtcgactcggccgtccagtcgtaggcgttgcgtgccttccaggggcccgcgtaggcgatgccggcgacctcgccgtccacctcggcgacgagccagggatagcgctcccgcagacggacgaggtcgtccgtccactcctgcggttcctgcggctcggtacggaagttgaccgtgcttgtctcgatgtagtggttgacgatggtgcagaccgccggcatgtccgcctcggtggcacggcggatgtcggccgggcgtcgttctgggctcatggtagactcgagagagatagatttgtagagagagactggtgatttcagcgtgtcctctccaaatgaaatgaacttccttatatagaggaaggtcttgcgaaggatagtgggattgtgcgtcatcccttacgtcagtggagatatcacatcaatccacttgctttgaagacgtggttggaacgtcttctttttccacgatgctcctcgtgggtgggggtccatctttgggaccactgtcggcagaggcatcttgaacgatagcctttcctttatcgcaatgatggcatttgtaggtgccaccttccttttctactgtccttttgatgaagtgacagatagctgggcaatggaatccgaggaggtttcccgatattaccctttgttgaaaagtctcaatagccctttggtcttctgagactgtatctttgatattcttggagtagacgagagtgtcgtgctccaccatgttatcacatcaatccacttgctttgaagacgtggttggaacgtcttctttttccacgatgctcctcgtgggtgggggtccatctttgggaccactgtcggcagaggcatcttgaacgatagcctttcctttatcgcaatgatggcatttgtaggtgccaccttccttttctactgtccttttgatgaagtgacagatagctgggcaatggaatccgaggaggtttcccgatattaccctttgttgaaaagtctcaatagccctttggtcttctgagactgtatctttgatattcttggagtagacgagagtgtcgtgctccaccatgttggcaagctgctctagccaatacgcaaaccgcctctccccgcgcgttggccgattcattaatgcagctggcacgacaggtttcccgactggaaagcgggcagtgagcgcaacgcaattaatgtgagttagctcactcattaggcaccccagcggccgcggtatcactagtattacagaggtaagttataacagtcgcctaacctctagagggcccaattcgccctatagtgagtcgtattacaattcactggccgtcgttttacaacgtcgtgactgggaaaaccctggcgttacccaacttaatcgccttgcagcacatccccctttcgccagctggcgtaatagcgaagaggcccgcaccgatcgcccttcccaacagttgcgcagcctatacgtacggcagtttaaggtttacacctataaaagagagagccgttatcgtctgtttgtggatgtacagagtgatattattgacacgccggggcgacggatggtgatccccctggccagtgcacgtctgctgtcagataaagtctcccgtgaactttacccggtggtgcatatcggggatgaaagctggcgcatgatgaccaccgatatggccagtgtgccggtctccgttatcggggaagaagtggctgatctcagccaccgcgaaaatgacatcaaaaacgccattaacctgatgttctggggaatataaatgtcaggcatgagattatcaaaaaggatcttcacctagatccttttcacgtagaaagccagtccgcagaaacggtgctgaccccggatgaatgtcagctactgggctatctggacaagggaaaacgcaagcgcaaagagaaagcaggtagcttgcagtgggcttacatggcgatagctagactgggcggttttatggacagcaagcgaaccggaattgccagctggggcgccctctggtaaggttgggaagccctgcaaagtaaactggatggctttctcgccgccaaggatctgatggcgcaggggatcaagctctgatcaagagacaggatgaggatcgtttcgcatgattgaacaagatggattgcacgcaggttctccggccgcttgggtggagaggctattcggctatgactgggcacaacagacaatcggctgctctgatgccgccgtgttccggctgtcagcgcaggggcgcccggttctttttgtcaagaccgacctgtccggtgccctgaatgaactgcaagacgaggcagcgcggctatcgtggctggccacgacgggcgttccttgcgcagctgtgctcgacgttgtcactgaagcgggaagggactggctgctattgggcgaagtgccggggcaggatctcctgtcatctcaccttgctcctgccgagaaagtatccatcatggctgatgcaatgcggcggctgcatacgcttgatccggctacctgcccattcgaccaccaagcgaaacatcgcatcgagcgagcacgtactcggatggaagccggtcttgtcgatcaggatgatctggacgaagagcatcaggggctcgcgccagccgaactgttcgccaggctcaaggcgagcatgcccgacggcgaggatctcgtcgtgacccatggcgatgcctgcttgccgaatatcatggtggaaaatggccgcttttctggattcatcgactgtggccggctgggtgtggcggaccgctatcaggacatagcgttggctacccgtgatattgctgaagagcttggcggcgaatgggctgaccgcttcctcgtgctttacggtatcgccgctcccgattcgcagcgcatcgccttctatcgccttcttgacgagttcttctgaattattaacgcttacaatttcctgatgcggtattttctccttacgcatctgtgcggtatttcacaccgcatacaggtggcacttttcggggaaatgtgcgcggaacccctatttgtttatttttctaaatacattcaaatatgtatccgctcatgagacaataaccctgataaatgcttcaataatagcacgtgaggagggccaccatggccaagttgaccagtgccgttccggtgctcaccgcgcgcgacgtcgccggagcggtcgagttctggaccgaccggctcgggttctcccgggacttcgtggaggacgacttcgccggtgtggtccgggacgacgtgaccctgttcatcagcgcggtccaggaccaggtggtgccggacaacaccctggcctgggtgtgggtgcgcggcctggacgagctgtacgccgagtggtcggaggtcgtgtccacgaacttccgggacgcctccgggccggccatgaccgagatcggcgagcagccgtgggggcgggagttcgccctgcgcgacccggccggcaactgcgtgcacttcgtggccgaggagcaggactgacacgtgctaaaacttcatttttaatttaaaaggatctaggtgaagatcctttttgataatctcatgaccaaaatcccttaacgtgagttttcgttccactgagcgtcagaccccgtagaaaagatcaaaggatcttcttgagatcctttttttctgcgcgtaatctgctgcttgcaaacaaaaaaaccaccgctaccagcggtggtttgtttgccggatcaagagctaccaactctttttccgaaggtaactggcttcagcagagcgcagataccaaatactgtccttctagtgtagccgtagttaggccaccacttcaagaactctgtagcaccgcctacatacctcgctctgctaatcctgttaccagtggctgctgccagtggcgataagtcgtgtcttaccgggttggactcaagacgatagttaccggataaggcgcagcggtcgggctgaacggggggttcgtgcacacagcccagcttggagcgaacgacctacaccgaactgagatacctacagcgtgagctatgagaaagcgccacgcttcccgaagggagaaaggcggacaggtatccggtaagcggcagggtcggaacaggagagcgcacgagggagcttccagggggaaacgcctggtatctttatagtcctgtcgggtttcgccacctctgacttgagcgtcgatttttgtgatgctcgtcaggggggcggagcctatggaaaaacgccagcaacgcggcctttttacggttcctgggcttttgctggccttttgctcacatgttctttcctgcgttatcccctgattctgtggataaccgtattaccgcctttgagtgagctgataccgctcgccgcagccgaacgaccgagcgcagcgagtcagtgagcgaggaagcggaagagcgcccaatacgcaaaccgcctctccccgcgcgttggccgattcattaatgcagctggcacgacaggtttcccgactggaaagcgggcagtgagcgcaacgcaattaatgtgagttagctcactcattaggcaccccaggctttacactttatgcttccggctcgtatgttgtgtggaattgtgagcggataacaatttcacacaggaaacagctatgaccatgattacgccaagctatttaggtgacactatagaatactcaagctatgcatc

SEQ ID NO: 56 - DNA, 5284 bp, Artificial Sequence
  Synthetic DNA vector
aagcttggtacttaatcgaaaaaaaaacagacagccatgtgctcttcggccttaattaaggtgcgtttttatgcttgtagtattgtataatgtttttaagatcctagggataacagggtaatgagctcggatccactagttcgggggatctggattttagtactggattttggttttaggaattagaaattttattgatagaagtattttacaaatacaaatacatactaagggtttcttatatgctcaacacatgagcgaaaccctataggaaccctaattcccttatctgggaactactcacacattattatggagaaactcgagtcaaatctcggtgacgggcaggaccggacggggcggtaccggcaggctgaagtccagctgccagaaacccacgtcatgccagttcccgtgcttgaagccggccgcccgcagcatgccgcggggggcatatccgagcgcctcgtgcatgcgcacgctcgggtcgttgggcagcccgatgacagcgaccacgctcttgaagccctgtgcctccagggacttcagcaggtgggtgtagagcgtggagcccagtcccgtccgctggtggcggggggagacgtacacggtcgactcggccgtccagtcgtaggcgttgcgtgccttccaggggcccgcgtaggcgatgccggcgacctcgccgtccacctcggcgacgagccagggatagcgctcccgcagacggacgaggtcgtccgtccactcctgcggttcctgcggctcggtacggaagttgaccgtgcttgtctcgatgtagtggttgacgatggtgcagaccgccggcatgtccgcctcggtggcacggcggatgtcggccgggcgtcgttctgggctcatggtagactcgagagagatagatttgtagagagagactggtgatttcagcgtgtcctctccaaatgaaatgaacttccttatatagaggaaggtcttgcgaaggatagtgggattgtgcgtcatcccttacgtcagtggagatatcacatcaatccacttgctttgaagacgtggttggaacgtcttctttttccacgatgctcctcgtgggtgggggtccatctttgggaccactgtcggcagaggcatcttgaacgatagcctttcctttatcgcaatgatggcatttgtaggtgccaccttccttttctactgtccttttgatgaagtgacagatagctgggcaatggaatccgaggaggtttcccgatattaccctttgttgaaaagtctcaatagccctttggtcttctgagactgtatctttgatattcttggagtagacgagagtgtcgtgctccaccatgttatcacatcaatccacttgctttgaagacgtggttggaacgtcttctttttccacgatgctcctcgtgggtgggggtccatctttgggaccactgtcggcagaggcatcttgaacgatagcctttcctttatcgcaatgatggcatttgtaggtgccaccttccttttctactgtccttttgatgaagtgacagatagctgggcaatggaatccgaggaggtttcccgatattaccctttgttgaaaagtctcaatagccctttggtcttctgagactgtatctttgatattcttggagtagacgagagtgtcgtgctccaccatgttggcaagctgctctagccaatacgcaaaccgcctctccccgcgcgttggccgattcattaatgcagctggcacgacaggtttcccgactggaaagcgggcagtgagcgcaacgcaattaatgtgagttagctcactcattaggcaccccagcggccgcggtatcactagtattacagaggtaagttataacagtcgcctaacctctagagggcccaattcgccctatagtgagtcgtattacaattcactggccgtcgttttacaacgtcgtgactgggaaaaccctggcgttacccaacttaatcgccttgcagcacatccccctttcgccagctggcgtaatagcgaagaggcccgcaccgatcgcccttcccaacagttgcgcagcctatacgtacggcagtttaaggtttacacctataaaagagagagccgttatcgtctgtttgtggatgtacagagtgatattattgacacgccggggcgacggatggtgatccccctggccagtgcacgtctgctgtcagataaagtctcccgtgaactttacccggtggtgcatatcggggatgaaagctggcgcatgatgaccaccgatatggccagtgtgccggtctccgttatcggggaagaagtggctgatctcagccaccgcgaaaatgacatcaaaaacgccattaacctgatgttctggggaatataaatgtcaggcatgagattatcaaaaaggatcttcacctagatccttttcacgtagaaagccagtccgcagaaacggtgctgaccccggatgaatgtcagctactgggctatctggacaagggaaaacgcaagcgcaaagagaaagcaggtagcttgcagtgggcttacatggcgatagctagactgggcggttttatggacagcaagcgaaccggaattgccagctggggcgccctctggtaaggttgggaagccctgcaaagtaaactggatggctttctcgccgccaaggatctgatggcgcaggggatcaagctctgatcaagagacaggatgaggatcgtttcgcatgattgaacaagatggattgcacgcaggttctccggccgcttgggtggagaggctattcggctatgactgggcacaacagacaatcggctgctctgatgccgccgtgttccggctgtcagcgcaggggcgcccggttctttttgtcaagaccgacctgtccggtgccctgaatgaactgcaagacgaggcagcgcggctatcgtggctggccacgacgggcgttccttgcgcagctgtgctcgacgttgtcactgaagcgggaagggactggctgctattgggcgaagtgccggggcaggatctcctgtcatctcaccttgctcctgccgagaaagtatccatcatggctgatgcaatgcggcggctgcatacgcttgatccggctacctgcccattcgaccaccaagcgaaacatcgcatcgagcgagcacgtactcggatggaagccggtcttgtcgatcaggatgatctggacgaagagcatcaggggctcgcgccagccgaactgttcgccaggctcaaggcgagcatgcccgacggcgaggatctcgtcgtgacccatggcgatgcctgcttgccgaatatcatggtggaaaatggccgcttttctggattcatcgactgtggccggctgggtgtggcggaccgctatcaggacatagcgttggctacccgtgatattgctgaagagcttggcggcgaatgggctgaccgcttcctcgtgctttacggtatcgccgctcccgattcgcagcgcatcgccttctatcgccttcttgacgagttcttctgaattattaacgcttacaatttcctgatgcggtattttctccttacgcatctgtgcggtatttcacaccgcatacaggtggcacttttcggggaaatgtgcgcggaacccctatttgtttatttttctaaatacattcaaatatgtatccgctcatgagacaataaccctgataaatgcttcaataatagcacgtgaggagggccaccatggccaagttgaccagtgccgttccggtgctcaccgcgcgcgacgtcgccggagcggtcgagttctggaccgaccggctcgggttctcccgggacttcgtggaggacgacttcgccggtgtggtccgggacgacgtgaccctgttcatcagcgcggtccaggaccaggtggtgccggacaacaccctggcctgggtgtgggtgcgcggcctggacgagctgtacgccgagtggtcggaggtcgtgtccacgaacttccgggacgcctccgggccggccatgaccgagatcggcgagcagccgtgggggcgggagttcgccctgcgcgacccggccggcaactgcgtgcacttcgtggccgaggagcaggactgacacgtgctaaaacttcatttttaatttaaaaggatctaggtgaagatcctttttgataatctcatgaccaaaatcccttaacgtgagttttcgttccactgagcgtcagaccccgtagaaaagatcaaaggatcttcttgagatcctttttttctgcgcgtaatctgctgcttgcaaacaaaaaaaccaccgctaccagcggtggtttgtttgccggatcaagagctaccaactctttttccgaaggtaactggcttcagcagagcgcagataccaaatactgtccttctagtgtagccgtagttaggccaccacttcaagaactctgtagcaccgcctacatacctcgctctgctaatcctgttaccagtggctgctgccagtggcgataagtcgtgtcttaccgggttggactcaagacgatagttaccggataaggcgcagcggtcgggctgaacggggggttcgtgcacacagcccagcttggagcgaacgacctacaccgaactgagatacctacagcgtgagctatgagaaagcgccacgcttcccgaagggagaaaggcggacaggtatccggtaagcggcagggtcggaacaggagagcgcacgagggagcttccagggggaaacgcctggtatctttatagtcctgtcgggtttcgccacctctgacttgagcgtcgatttttgtgatgctcgtcaggggggcggagcctatggaaaaacgccagcaacgcggcctttttacggttcctgggcttttgctggccttttgctcacatgttctttcctgcgttatcccctgattctgtggataaccgtattaccgcctttgagtgagctgataccgctcgccgcagccgaacgaccgagcgcagcgagtcagtgagcgaggaagcggaagagcgcccaatacgcaaaccgcctctccccgcgcgttggccgattcattaatgcagctggcacgacaggtttcccgactggaaagcgggcagtgagcgcaacgcaattaatgtgagttagctcactcattaggcaccccaggctttacactttatgcttccggctcgtatgttgtgtggaattgtgagcggataacaatttcacacaggaaacagctatgaccatgattacgccaagctatttaggtgacactatagaatactcaagctatgcatc

SEQ ID NO: 57 - DNA, 5284 bp, Artificial Sequence
  Synthetic DNA vector
aagcttggtggacatgattatggaacacacacacgctagccgcccagttccttaattaaggtgcgtttttatgcttgtagtattgtataatgtttttaagatcctagggataacagggtaatgagctcggatccactagttcgggggatctggattttagtactggattttggttttaggaattagaaattttattgatagaagtattttacaaatacaaatacatactaagggtttcttatatgctcaacacatgagcgaaaccctataggaaccctaattcccttatctgggaactactcacacattattatggagaaactcgagtcaaatctcggtgacgggcaggaccggacggggcggtaccggcaggctgaagtccagctgccagaaacccacgtcatgccagttcccgtgcttgaagccggccgcccgcagcatgccgcggggggcatatccgagcgcctcgtgcatgcgcacgctcgggtcgttgggcagcccgatgacagcgaccacgctcttgaagccctgtgcctccagggacttcagcaggtgggtgtagagcgtggagcccagtcccgtccgctggtggcggggggagacgtacacggtcgactcggccgtccagtcgtaggcgttgcgtgccttccaggggcccgcgtaggcgatgccggcgacctcgccgtccacctcggcgacgagccagggatagcgctcccgcagacggacgaggtcgtccgtccactcctgcggttcctgcggctcggtacggaagttgaccgtgcttgtctcgatgtagtggttgacgatggtgcagaccgccggcatgtccgcctcggtggcacggcggatgtcggccgggcgtcgttctgggctcatggtagactcgagagagatagatttgtagagagagactggtgatttcagcgtgtcctctccaaatgaaatgaacttccttatatagaggaaggtcttgcgaaggatagtgggattgtgcgtcatcccttacgtcagtggagatatcacatcaatccacttgctttgaagacgtggttggaacgtcttctttttccacgatgctcctcgtgggtgggggtccatctttgggaccactgtcggcagaggcatcttgaacgatagcctttcctttatcgcaatgatggcatttgtaggtgccaccttccttttctactgtccttttgatgaagtgacagatagctgggcaatggaatccgaggaggtttcccgatattaccctttgttgaaaagtctcaatagccctttggtcttctgagactgtatctttgatattcttggagtagacgagagtgtcgtgctccaccatgttatcacatcaatccacttgctttgaagacgtggttggaacgtcttctttttccacgatgctcctcgtgggtgggggtccatctttgggaccactgtcggcagaggcatcttgaacgatagcctttcctttatcgcaatgatggcatttgtaggtgccaccttccttttctactgtccttttgatgaagtgacagatagctgggcaatggaatccgaggaggtttcccgatattaccctttgttgaaaagtctcaatagccctttggtcttctgagactgtatctttgatattcttggagtagacgagagtgtcgtgctccaccatgttggcaagctgctctagccaatacgcaaaccgcctctccccgcgcgttggccgattcattaatgcagctggcacgacaggtttcccgactggaaagcgggcagtgagcgcaacgcaattaatgtgagttagctcactcattaggcaccccagcggccgcggtatcactagtattacagaggtaagttataacagtcgcctaacctctagagggcccaattcgccctatagtgagtcgtattacaattcactggccgtcgttttacaacgtcgtgactgggaaaaccctggcgttacccaacttaatcgccttgcagcacatccccctttcgccagctggcgtaatagcgaagaggcccgcaccgatcgcccttcccaacagttgcgcagcctatacgtacggcagtttaaggtttacacctataaaagagagagccgttatcgtctgtttgtggatgtacagagtgatattattgacacgccggggcgacggatggtgatccccctggccagtgcacgtctgctgtcagataaagtctcccgtgaactttacccggtggtgcatatcggggatgaaagctggcgcatgatgaccaccgatatggccagtgtgccggtctccgttatcggggaagaagtggctgatctcagccaccgcgaaaatgacatcaaaaacgccattaacctgatgttctggggaatataaatgtcaggcatgagattatcaaaaaggatcttcacctagatccttttcacgtagaaagccagtccgcagaaacggtgctgaccccggatgaatgtcagctactgggctatctggacaagggaaaacgcaagcgcaaagagaaagcaggtagcttgcagtgggcttacatggcgatagctagactgggcggttttatggacagcaagcgaaccggaattgccagctggggcgccctctggtaaggttgggaagccctgcaaagtaaactggatggctttctcgccgccaaggatctgatggcgcaggggatcaagctctgatcaagagacaggatgaggatcgtttcgcatgattgaacaagatggattgcacgcaggttctccggccgcttgggtggagaggctattcggctatgactgggcacaacagacaatcggctgctctgatgccgccgtgttccggctgtcagcgcaggggcgcccggttctttttgtcaagaccgacctgtccggtgccctgaatgaactgcaagacgaggcagcgcggctatcgtggctggccacgacgggcgttccttgcgcagctgtgctcgacgttgtcactgaagcgggaagggactggctgctattgggcgaagtgccggggcaggatctcctgtcatctcaccttgctcctgccgagaaagtatccatcatggctgatgcaatgcggcggctgcatacgcttgatccggctacctgcccattcgaccaccaagcgaaacatcgcatcgagcgagcacgtactcggatggaagccggtcttgtcgatcaggatgatctggacgaagagcatcaggggctcgcgccagccgaactgttcgccaggctcaaggcgagcatgcccgacggcgaggatctcgtcgtgacccatggcgatgcctgcttgccgaatatcatggtggaaaatggccgcttttctggattcatcgactgtggccggctgggtgtggcggaccgctatcaggacatagcgttggctacccgtgatattgctgaagagcttggcggcgaatgggctgaccgcttcctcgtgctttacggtatcgccgctcccgattcgcagcgcatcgccttctatcgccttcttgacgagttcttctgaattattaacgcttacaatttcctgatgcggtattttctccttacgcatctgtgcggtatttcacaccgcatacaggtggcacttttcggggaaatgtgcgcggaacccctatttgtttatttttctaaatacattcaaatatgtatccgctcatgagacaataaccctgataaatgcttcaataatagcacgtgaggagggccaccatggccaagttgaccagtgccgttccggtgctcaccgcgcgcgacgtcgccggagcggtcgagttctggaccgaccggctcgggttctcccgggacttcgtggaggacgacttcgccggtgtggtccgggacgacgtgaccctgttcatcagcgcggtccaggaccaggtggtgccggacaacaccctggcctgggtgtgggtgcgcggcctggacgagctgtacgccgagtggtcggaggtcgtgtccacgaacttccgggacgcctccgggccggccatgaccgagatcggcgagcagccgtgggggcgggagttcgccctgcgcgacccggccggcaactgcgtgcacttcgtggccgaggagcaggactgacacgtgctaaaacttcatttttaatttaaaaggatctaggtgaagatcctttttgataatctcatgaccaaaatcccttaacgtgagttttcgttccactgagcgtcagaccccgtagaaaagatcaaaggatcttcttgagatcctttttttctgcgcgtaatctgctgcttgcaaacaaaaaaaccaccgctaccagcggtggtttgtttgccggatcaagagctaccaactctttttccgaaggtaactggcttcagcagagcgcagataccaaatactgtccttctagtgtagccgtagttaggccaccacttcaagaactctgtagcaccgcctacatacctcgctctgctaatcctgttaccagtggctgctgccagtggcgataagtcgtgtcttaccgggttggactcaagacgatagttaccggataaggcgcagcggtcgggctgaacggggggttcgtgcacacagcccagcttggagcgaacgacctacaccgaactgagatacctacagcgtgagctatgagaaagcgccacgcttcccgaagggagaaaggcggacaggtatccggtaagcggcagggtcggaacaggagagcgcacgagggagcttccagggggaaacgcctggtatctttatagtcctgtcgggtttcgccacctctgacttgagcgtcgatttttgtgatgctcgtcaggggggcggagcctatggaaaaacgccagcaacgcggcctttttacggttcctgggcttttgctggccttttgctcacatgttctttcctgcgttatcccctgattctgtggataaccgtattaccgcctttgagtgagctgataccgctcgccgcagccgaacgaccgagcgcagcgagtcagtgagcgaggaagcggaagagcgcccaatacgcaaaccgcctctccccgcgcgttggccgattcattaatgcagctggcacgacaggtttcccgactggaaagcgggcagtgagcgcaacgcaattaatgtgagttagctcactcattaggcaccccaggctttacactttatgcttccggctcgtatgttgtgtggaattgtgagcggataacaatttcacacaggaaacagctatgaccatgattacgccaagctatttaggtgacactatagaatactcaagctatgcatc

SEQ ID NO: 58 - DNA, 5284 bp, Artificial Sequence
  Synthetic DNA vector
aagcttggtgagcccaaacagcgaaatacctgagcgaacaaatactactccttaattaaggtgcgtttttatgcttgtagtattgtataatgtttttaagatcctagggataacagggtaatgagctcggatccactagttcgggggatctggattttagtactggattttggttttaggaattagaaattttattgatagaagtattttacaaatacaaatacatactaagggtttcttatatgctcaacacatgagcgaaaccctataggaaccctaattcccttatctgggaactactcacacattattatggagaaactcgagtcaaatctcggtgacgggcaggaccggacggggcggtaccggcaggctgaagtccagctgccagaaacccacgtcatgccagttcccgtgcttgaagccggccgcccgcagcatgccgcggggggcatatccgagcgcctcgtgcatgcgcacgctcgggtcgttgggcagcccgatgacagcgaccacgctcttgaagccctgtgcctccagggacttcagcaggtgggtgtagagcgtggagcccagtcccgtccgctggtggcggggggagacgtacacggtcgactcggccgtccagtcgtaggcgttgcgtgccttccaggggcccgcgtaggcgatgccggcgacctcgccgtccacctcggcgacgagccagggatagcgctcccgcagacggacgaggtcgtccgtccactcctgcggttcctgcggctcggtacggaagttgaccgtgcttgtctcgatgtagtggttgacgatggtgcagaccgccggcatgtccgcctcggtggcacggcggatgtcggccgggcgtcgttctgggctcatggtagactcgagagagatagatttgtagagagagactggtgatttcagcgtgtcctctccaaatgaaatgaacttccttatatagaggaaggtcttgcgaaggatagtgggattgtgcgtcatcccttacgtcagtggagatatcacatcaatccacttgctttgaagacgtggttggaacgtcttctttttccacgatgctcctcgtgggtgggggtccatctttgggaccactgtcggcagaggcatcttgaacgatagcctttcctttatcgcaatgatggcatttgtaggtgccaccttccttttctactgtccttttgatgaagtgacagatagctgggcaatggaatccgaggaggtttcccgatattaccctttgttgaaaagtctcaatagccctttggtcttctgagactgtatctttgatattcttggagtagacgagagtgtcgtgctccaccatgttatcacatcaatccacttgctttgaagacgtggttggaacgtcttctttttccacgatgctcctcgtgggtgggggtccatctttgggaccactgtcggcagaggcatcttgaacgatagcctttcctttatcgcaatgatggcatttgtaggtgccaccttccttttctactgtccttttgatgaagtgacagatagctgggcaatggaatccgaggaggtttcccgatattaccctttgttgaaaagtctcaatagccctttggtcttctgagactgtatctttgatattcttggagtagacgagagtgtcgtgctccaccatgttggcaagctgctctagccaatacgcaaaccgcctctccccgcgcgttggccgattcattaatgcagctggcacgacaggtttcccgactggaaagcgggcagtgagcgcaacgcaattaatgtgagttagctcactcattaggcaccccagcggccgcggtatcactagtattacagaggtaagttataacagtcgcctaacctctagagggcccaattcgccctatagtgagtcgtattacaattcactggccgtcgttttacaacgtcgtgactgggaaaaccctggcgttacccaacttaatcgccttgcagcacatccccctttcgccagctggcgtaatagcgaagaggcccgcaccgatcgcccttcccaacagttgcgcagcctatacgtacggcagtttaaggtttacacctataaaagagagagccgttatcgtctgtttgtggatgtacagagtgatattattgacacgccggggcgacggatggtgatccccctggccagtgcacgtctgctgtcagataaagtctcccgtgaactttacccggtggtgcatatcggggatgaaagctggcgcatgatgaccaccgatatggccagtgtgccggtctccgttatcggggaagaagtggctgatctcagccaccgcgaaaatgacatcaaaaacgccattaacctgatgttctggggaatataaatgtcaggcatgagattatcaaaaaggatcttcacctagatccttttcacgtagaaagccagtccgcagaaacggtgctgaccccggatgaatgtcagctactgggctatctggacaagggaaaacgcaagcgcaaagagaaagcaggtagcttgcagtgggcttacatggcgatagctagactgggcggttttatggacagcaagcgaaccggaattgccagctggggcgccctctggtaaggttgggaagccctgcaaagtaaactggatggctttctcgccgccaaggatctgatggcgcaggggatcaagctctgatcaagagacaggatgaggatcgtttcgcatgattgaacaagatggattgcacgcaggttctccggccgcttgggtggagaggctattcggctatgactgggcacaacagacaatcggctgctctgatgccgccgtgttccggctgtcagcgcaggggcgcccggttctttttgtcaagaccgacctgtccggtgccctgaatgaactgcaagacgaggcagcgcggctatcgtggctggccacgacgggcgttccttgcgcagctgtgctcgacgttgtcactgaagcgggaagggactggctgctattgggcgaagtgccggggcaggatctcctgtcatctcaccttgctcctgccgagaaagtatccatcatggctgatgcaatgcggcggctgcatacgcttgatccggctacctgcccattcgaccaccaagcgaaacatcgcatcgagcgagcacgtactcggatggaagccggtcttgtcgatcaggatgatctggacgaagagcatcaggggctcgcgccagccgaactgttcgccaggctcaaggcgagcatgcccgacggcgaggatctcgtcgtgacccatggcgatgcctgcttgccgaatatcatggtggaaaatggccgcttttctggattcatcgactgtggccggctgggtgtggcggaccgctatcaggacatagcgttggctacccgtgatattgctgaagagcttggcggcgaatgggctgaccgcttcctcgtgctttacggtatcgccgctcccgattcgcagcgcatcgccttctatcgccttcttgacgagttcttctgaattattaacgcttacaatttcctgatgcggtattttctccttacgcatctgtgcggtatttcacaccgcatacaggtggcacttttcggggaaatgtgcgcggaacccctatttgtttatttttctaaatacattcaaatatgtatccgctcatgagacaataaccctgataaatgcttcaataatagcacgtgaggagggccaccatggccaagttgaccagtgccgttccggtgctcaccgcgcgcgacgtcgccggagcggtcgagttctggaccgaccggctcgggttctcccgggacttcgtggaggacgacttcgccggtgtggtccgggacgacgtgaccctgttcatcagcgcggtccaggaccaggtggtgccggacaacaccctggcctgggtgtgggtgcgcggcctggacgagctgtacgccgagtggtcggaggtcgtgtccacgaacttccgggacgcctccgggccggccatgaccgagatcggcgagcagccgtgggggcgggagttcgccctgcgcgacccggccggcaactgcgtgcacttcgtggccgaggagcaggactgacacgtgctaaaacttcatttttaatttaaaaggatctaggtgaagatcctttttgataatctcatgaccaaaatcccttaacgtgagttttcgttccactgagcgtcagaccccgtagaaaagatcaaaggatcttcttgagatcctttttttctgcgcgtaatctgctgcttgcaaacaaaaaaaccaccgctaccagcggtggtttgtttgccggatcaagagctaccaactctttttccgaaggtaactggcttcagcagagcgcagataccaaatactgtccttctagtgtagccgtagttaggccaccacttcaagaactctgtagcaccgcctacatacctcgctctgctaatcctgttaccagtggctgctgccagtggcgataagtcgtgtcttaccgggttggactcaagacgatagttaccggataaggcgcagcggtcgggctgaacggggggttcgtgcacacagcccagcttggagcgaacgacctacaccgaactgagatacctacagcgtgagctatgagaaagcgccacgcttcccgaagggagaaaggcggacaggtatccggtaagcggcagggtcggaacaggagagcgcacgagggagcttccagggggaaacgcctggtatctttatagtcctgtcgggtttcgccacctctgacttgagcgtcgatttttgtgatgctcgtcaggggggcggagcctatggaaaaacgccagcaacgcggcctttttacggttcctgggcttttgctggccttttgctcacatgttctttcctgcgttatcccctgattctgtggataaccgtattaccgcctttgagtgagctgataccgctcgccgcagccgaacgaccgagcgcagcgagtcagtgagcgaggaagcggaagagcgcccaatacgcaaaccgcctctccccgcgcgttggccgattcattaatgcagctggcacgacaggtttcccgactggaaagcgggcagtgagcgcaacgcaattaatgtgagttagctcactcattaggcaccccaggctttacactttatgcttccggctcgtatgttgtgtggaattgtgagcggataacaatttcacacaggaaacagctatgaccatgattacgccaagctatttaggtgacactatagaatactcaagctatgcatc

SEQ ID NO: 59 - DNA, 8500 bp, Artificial Sequence
  Synthetic DNA vector
gtttacccgccaatatatcctgtcaaacactgatagtttaaactgaaggcgggaaacgacaatctgatccaagctcaagctgctctagcattcgccattcaggctgcgcaactgttgggaagggcgatcggtgcgggcctcttcgctattacgccagctggcgaaagggggatgtgctgcaaggcgattaagttgggtaacgccagggttttcccagtcacgacgttgtaaaacgacggccagtgccaagctttagggataacagggtaatggtttaccgagctcttattggttttcaaacttcattgactgtgccttaattaaatatccagtcactatggcggcccctcgaggggccgcattaggcaccccaggctttacactttatgcttccggctcgtataatgtgtggattttgagttaggatccggcgagattttcaggagctaaggaagctaaaatggagaaaaaaatcactggatataccaccgttgatatatcccaatggcatcgtaaagaacattttgaggcatttcagtcagttgctcaatgtacctataaccagaccgttcagctggatattacggcctttttaaagaccgtaaagaaaaataagcacaagttttatccggcctttattcacattcttgcccgcctgatgaatgctcatccggaattccgtatggcaatgaaagacggtgagctggtgatatgggatagtgttcacccttgttacaccgttttccatgagcaaactgaaacgttttcatcgctctggagtgaataccacgacgatttccggcagtttctacacatatattcgcaagatgtggcgtgttacggtgaaaacctggcctatttccctaaagggtttattgagaatatgtttttcgtctcagccaatccctgggtgagtttcaccagttttgatttaaacgtggccaatatggacaacttcttcgcccccgttttcaccatgggcaaatattatacgcaaggcgacaaggtgctgatgccgctggcgattcaggttcatcatgccgtctgtgatggcttccatgtcggcagaatgcttaatgaattacaacagtactgcgatgagtggcagggcggggcgtaaagatctggatccggcttactaaaagccagataacagtatgcgtatttgcgcgctgatttttgcggtataagaatatatactgatatgtatacccgaagtatgtcaaaaagaggtgtgctatgaagcagcgtattacagtgacagttgacagcgacagctatcagttgctcaaggcatatatgatgtcaatatctccggtctggtaagcacaaccatgcagaatgaagcccgtcgtctgcgtgccgaacgctggaaagcggaaaatcaggaagggatggctgaggtcgcccggtttattgaaatgaacggctcttttgctgacgagaacagggactggtgaaatgcagtttaaggtttacacctataaaagagagagccgttatcgtctgtttgtggatgtacagagtgatattattgacacgcccgggcgacggatggtgatccccctggccagtgcacgtctgctgtcagataaagtctcccgtgaactttacccggtggtgcatatcggggatgaaagctggcgcatgatgaccaccgatatggccagtgtgccggtctccgttatcggggaagaagtggctgatctcagccaccgcgaaaatgacatcaaaaacgccattaacctgatgttctggggaatataaatgtcaggctcccttatacacagccagtctgcaggtcgaccatagtgactggatatgttaattaaggtatcactagtattacagaggtaagttataacagtcgcctaaccgaattcagaaataaattcagcctaattcggcgttaattcagtacattaaaaacgtccgcaatgtgttattaagttgtctaagcgtcaatttgtttacaccacaatatatcctgccaccagccagccaacagctccccgaccggcagctcggcacaaaatcaccactcgatacaggcagcccatcagtccgggacggcgtcagcgggagagccgttgtaaggcggcagactttgctcatgttaccgatgctattcggaagaacggcaactaagctgccgggtttgaaacacggatgatctcgcggagggtagcatgttgattgtaacgatgacagagcgttgctgcctgtgatcaattcgggcacgaacccagtggacataagcctgttcggttcgtaagctgtaatgcaagtagcgtatgcgctcacgcaactggtccagaaccttgaccgaacgcagcggtggtaacggcgcagtggcggttttcatggcttgttatgactgtttttttggggtacagtctatgcctcgggcatccaagcagcaagcgcgttacgccgtgggtcgatgtttgatgttatggagcagcaacgatgttacgcagcagggcagtcgccctaaaacaaagttaaacatcatgggggaagcggtgatcgccgaagtatcgactcaactatcagaggtagttggcgtcatcgagcgccatctcgaaccgacgttgctggccgtacatttgtacggctccgcagtggatggcggcctgaagccacacagtgatattgatttgctggttacggtgaccgtaaggcttgatgaaacaacgcggcgagctttgatcaacgaccttttggaaacttcggcttcccctggagagagcgagattctccgcgctgtagaagtcaccattgttgtgcacgacgacatcattccgtggcgttatccagctaagcgcgaactgcaatttggagaatggcagcgcaatgacattcttgcaggtatcttcgagccagccacgatcgacattgatctggctatcttgctgacaaaagcaagagaacatagcgttgccttggtaggtccagcggcggaggaactctttgatccggttcctgaacaggatctatttgaggcgctaaatgaaaccttaacgctatggaactcgccgcccgactgggctggcgatgagcgaaatgtagtgcttacgttgtcccgcatttggtacagcgcagtaaccggcaaaatcgcgccgaaggatgtcgctgccgactgggcaatggagcgcctgccggcccagtatcagcccgtcatacttgaagctagacaggcttatcttggacaagaagaagatcgcttggcctcgcgcgcagatcagttggaagaatttgtccactacgtgaaaggcgagatcaccaaggtagtcggcaaataatgtctagctagaaattcgttcaagccgacgccgcttcgcggcgcggcttaactcaagcgttagatgcactaagcacataattgctcacagccaaactatcaggtcaagtctgcttttattatttttaagcgtgcataataagccctacacaaattgggagatatatcatgcatgaccaaaatcccttaacgtgagttttcgttccactgagcgtcagaccccgtagaaaagatcaaaggatcttcttgagatcctttttttctgcgcgtaatctgctgcttgcaaacaaaaaaaccaccgctaccagcggtggtttgtttgccggatcaagagctaccaactctttttccgaaggtaactggcttcagcagagcgcagataccaaatactgtccttctagtgtagccgtagttaggccaccacttcaagaactctgtagcaccgcctacatacctcgctctgctaatcctgttaccagtggctgctgccagtggcgataagtcgtgtcttaccgggttggactcaagacgatagttaccggataaggcgcagcggtcgggctgaacggggggttcgtgcacacagcccagcttggagcgaacgacctacaccgaactgagatacctacagcgtgagctatgagaaagcgccacgcttcccgaagggagaaaggcggacaggtatccggtaagcggcagggtcggaacaggagagcgcacgagggagcttccagggggaaacgcctggtatctttatagtcctgtcgggtttcgccacctctgacttgagcgtcgatttttgtgatgctcgtcaggggggcggagcctatggaaaaacgccagcaacgcggcctttttacggttcctggccttttgctggccttttgctcacatgttctttcctgcgttatcccctgattctgtggataaccgtattaccgcctttgagtgagctgataccgctcgccgcagccgaacgaccgagcgcagcgagtcagtgagcgaggaagcggaagagcgcctgatgcggtattttctccttacgcatctgtgcggtatttcacaccgcatatggtgcactctcagtacaatctgctctgatgccgcatagttaagccagtatacactccgctatcgctacgtgactgggtcatggctgcgccccgacacccgccaacacccgctgacgcgccctgacgggcttgtctgctcccggcatccgcttacagacaagctgtgaccgtctccgggagctgcatgtgtcagaggttttcaccgtcatcaccgaaacgcgcgaggcagggtgccttgatgtgggcgccggcggtcgagtggcgacggcgcggcttgtccgcgccctggtagattgcctggccgtaggccagccatttttgagcggccagcggccgcgataggccgacgcgaagcggcggggcgtagggagcgcagcgaccgaagggtaggcgctttttgcagctcttcggctgtgcgctggccagacagttatgcacaggccaggcgggttttaagagttttaataagttttaaagagttttaggcggaaaaatcgccttttttctcttttatatcagtcacttacatgtgtgaccggttcccaatgtacggctttgggttcccaatgtacgggttccggttcccaatgtacggctttgggttcccaatgtacgtgctatccacaggaaagagaccttttcgacctttttcccctgctagggcaatttgccctagcatctgctccgtacattaggaaccggcggatgcttcgccctcgatcaggttgcggtagcgcatgactaggatcgggccagcctgccccgcctcctccttcaaatcgtactccggcaggtcatttgacccgatcagcttgcgcacggtgaaacagaacttcttgaactctccggcgctgccactgcgttcgtagatcgtcttgaacaaccatctggcttctgccttgcctgcggcgcggcgtgccaggcggtagagaaaacggccgatgccgggatcgatcaaaaagtaatcggggtgaaccgtcagcacgtccgggttcttgccttctgtgatctcgcggtacatccaatcagctagctcgatctcgatgtactccggccgcccggtttcgctctttacgatcttgtagcggctaatcaaggcttcaccctcggataccgtcaccaggcggccgttcttggccttcttcgtacgctgcatggcaacgtgcgtggtgtttaaccgaatgcaggtttctaccaggtcgtctttctgctttccgccatcggctcgccggcagaacttgagtacgtccgcaacgtgtggacggaacacgcggccgggcttgtctcccttcccttcccggtatcggttcatggattcggttagatgggaaaccgccatcagtaccaggtcgtaatcccacacactggccatgccggccggccctgcggaaacctctacgtgcccgtctggaagctcgtagcggatcacctcgccagctcgtcggtcacgcttcgacagacggaaaacggccacgtccatgatgctgcgactatcgcgggtgcccacgtcatagagcatcggaacgaaaaaatctggttgctcgtcgcccttgggcggcttcctaatcgacggcgcaccggctgccggcggttgccgggattctttgcggattcgatcagcggccgcttgccacgattcaccggggcgtgcttctgcctcgatgcgttgccgctgggcggcctgcgcggccttcaacttctccaccaggtcatcacccagcgccgcgccgatttgtaccgggccggatggtttgcgaccgctcacgccgattcctcgggcttgggggttccagtgccattgcagggccggcagacaacccagccgcttacgcctggccaaccgcccgttcctccacacatggggcattccacggcgtcggtgcctggttgttcttgattttccatgccgcctcctttagccgctaaaattcatctactcatttattcatttgctcatttactctggtagctgcgcgatgtattcagatagcagctcggtaatggtcttgccttggcgtaccgcgtacatcttcagcttggtgtgatcctccgccggcaactgaaagttgacccgcttcatggctggcgtgtctgccaggctggccaacgttgcagccttgctgctgcgtgcgctcggacggccggcacttagcgtgtttgtgcttttgctcattttctctttacctcattaactcaaatgagttttgatttaatttcagcggccagcgcctggacctcgcgggcagcgtcgccctcgggttctgattcaagaacggttgtgccggcggcggcagtgcctgggtagctcacgcgctgcgtgatacgggactcaagaatgggcagctcgtacccggccagcgcctcggcaacctcaccgccgatgcgcgtgcctttgatcgcccgcgacacgacaaaggccgcttgtagccttccatccgtgacctcaatgcgctgcttaaccagctccaccaggtcggcggtggcccatatgtcgtaagggcttggctgcaccggaatcagcacgaagtcggctgccttgatcgcggacacagccaagtccgccgcctggggcgctccgtcgatcactacgaagtcgcgccggccgatggccttcacgtcgcggtcaatcgtcgggcggtcgatgccgacaacggttagcggttgatcttcccgcacggccgcccaatcgcgggcactgccctggggatcggaatcgactaacagaacatcggccccggcgagttgcagggcgcgggctagatgggttgcgatggtcgtcttgcctgacccgcctttctggttaagtacagcgataaccttcatgcgttccccttgcgtatttgtttatttactcatcgcatcatatacgcagcgaccgcatgacgcaagctgttttactcaaatacacatcacctttttagacggcggcgctcggtttcttcagcggccaagctggccggccaggccgccagcttggcatcagacaaaccggccaggatttcatgcagccgcacggttgagacgtgcgcgggcggctcgaacacgtacccggccgcgatcatctccgcctcgatctcttcggtaatgaaaaacggttcgtcctggccgtcctggtgcggtttcatgcttgttcctcttggcgttcattctcggcggccgccagggcgtcggcctcggtcaatgcgtcctcacggaaggcaccgcgccgcctggcctcggtgggcgtcacttcctcgctgcgctcaagtgcgcggtacagggtcgagcgatgcacgccaagcagtgcagccgcctctttcacggtgcggccttcctggtcgatcagctcgcgggcgtgcgcgatctgtgccggggtgagggtagggcgggggccaaacttcacgcctcgggccttggcggcctcgcgcccgctccgggtgcggtcgatgattagggaacgctcgaactcggcaatgccggcgaacacggtcaacaccatgcggccggccggcgtggtggtgtcggcccacggctctgccaggctacgcaggcccgcgccggcctcctggatgcgctcggcaatgtccagtaggtcgcgggtgctgcgggccaggcggtctagcctggtcactgtcacaacgtcgccagggcgtaggtggtcaagcatcctggccagctccgggcggtcgcgcctggtgccggtgatcttctcggaaaacagcttggtgcagccggccgcgtgcagttcggcccgttggttggtcaagtcctggtcgtcggtgctgacgcgggcatagcccagcaggccagcggcggcgctcttgttcatggcgtaatgtctccggttctagtcgcaagtattctactttatgcgactaaaacacgcgacaagaaaacgccaggaaaagggcagggcggcagcctgtcgcgtaacttaggacttgtgcgacatgtcgttttcagaagacggctgcactgaacgtcagaagccgactgcactatagcagcggaggggttggatcaaagtactttgatcccgaggggaaccctgtggttggcatgcacatacaaatggacgaacggataaaccttttcacgcccttttaaatatccgattattctaataaacgctcttttctcttag

SEQ ID NO: 60 - DNA, 12593 bp, Artificial Sequence
  Synthetic DNA vector
gtttacccgccaatatatcctgtcaaacactgatagtttaaactgaaggcgggaaacgacaatctgatccaagctcaagctgctctagcattcgccattcaggctgcgcaactgttgggaagggcgatcggtgcgggcctcttcgctattacgccagctggcgaaagggggatgtgctgcaaggcgattaagttgggtaacgccagggttttcccagtcacgacgttgtaaaacgacggccagtgccaagcttattaccctgttatccctaaccggtttaccgagctcttattggttttcaaacttcattgactgtgcccctgcaggcacgtaataagtgtgcgttgaatttattcgcaaaaacattgcatattttcggcaaagtaaaattttgttgcataccttatcaaaaaataagtgctgcatactttttagagaaaccaaataattttttattgcatacccgtttttaataaaatacattgcataccctcttttaataaaaaatattgcatactttgacgaaacaaattttcgttgcatacccaataaaagattattatattgcatacccgtttttaataaaatacattgcataccctcttttaataaaaaatattgcatacgttgacgaaacaaattttcgttgcatacccaataaaagattattatattgcataccttttcttgccataccatttagccgatcaattgtgctcggcatctagagttatcaacaagtttgtacaaaaaagcaggcttagatttctatcaatgaaagtagacgttaaaaaaaaaaaaagatatcacagtacgtggaaacacgtgacacatattttaaagggaaaatataaacgtgaaatgcgtggaaactggcaagtagactattaatatttatgggcctatagtggttatatcaggctttattgggctctctatacgaattaaaagcctcaaacaaataatagaacttgaattgtaggcttttgtacccaccaaactggccgccggtgaccccctctcacgccgtatctctttttctttttcttgtttttttttttttttttttttttttttttttttgtgtgcgcgtatttgtttcaccatcaaaaaattaattttgttttaagtgttttattttccttcgttttgtttaaagtgtttaaaatcgttagttcaatgttgaaaaatatacaataatagaaacaattgtgacttttgtaatttgaatgaacaaaacatataacaataagtcctataatataaacattttaatttacattttcaactttttctcattttaaatttttattcagttgaaggcttgaagcgttggactactttagagaaactttacaagaacgttcttaacatctttttttctttcctttttgaatatcaaaatcagttaaaaacacttttgatctcacagaaactgatacaaagccgacggaaccgaccagattaggtcaaaaacgtaaaagacgcgcaaaaagaaaagaaaataactcataatagaatgttttagtcagaagaaaaaagtacaatatgaccaacgtaaacaaaaaagatgttgacgacataaagaaaagagctacagagacaaaggcattaaaatatcttttgtcgaaatctgaagatatttccttaagcgcgtttgcttctctgtctcctccattccattctatatcatctctgtctttgctctaagctttcctgtcaaaacaaaaattcaattccccacgtctgtcttatccacaataaaaccgaccttagcttagcttagactcattactcatttcacaaaaacagagagagaaatagagagacatactttacaggtaataattatcttgtttaattgtattatatatctctaactaaatttgggataaaaattgtctattcttgatcattcctctctgtatctctctgcttttgacaccttctcttagctgttttttcatcttttatctctgtttttaaaatcttttggctctttcgaagggtttcgagtccttttgagttctttgggcttcctcccaaatttctccacgagctcgacccctttcgtatcttccttctcatttttttgccaaatttattcgatccgtctttcactacaactttgtatacaaaagttgtaatgacaggaggctttaggaaatgcatggtgctttgttgtgcaagaaaactcccgaaagaaacaacaatgggaaccaccgcatacgacgaagccattacagggctgagcaagcttctcagtgagaagaaaggattggatgatgtagcagccgcaaaaatcaagcagttaacagcagagttgcagcagggcaccaagcaaaatggtgtttccgaaaacgggtttgacccggatgagcgcatcaaatccggattcatccggttcaagactgagaaatatgagaagaatcctgctctgtacggtgaacttgccaagggccagagtcccaagttcttggtatttgcctgctcagactcccgtgtttgcccctcccacatcttggatttcaagccaggggatgccttctcggttcgtaacatcgccaacatggtcccaccttttgataagacaaagttctctgggacaggggcagccattgagtatgctgtattgcatctaaatgtggagaatattgtggtcattggacacagctgctgtggaggaataaaggggctcatgtccatccctgattgtggcaccacttccacagacttcattgaagagtgggtcaagatcgctcagcctgctaggaccaaggtcaaagcagaagttagtagcgcagagttcacggagcagtgcaagaactgcgagaaggaagctgtcaatgtctctctcggaaacttgttgacatacccatttgtgagggaagcagtaatgaagaaaactctggcattgaagggtgcacattatgattttgtcaatggacgtttcgagctgtggaacctcgaatttggcctctcaccttctaccgcagtaaacccaacttttctatacaaagttgtaatggaacaaaagcttatttctgaggaagatcttaacggtgaacaaaagcttatttctgaggaagatcttaacggacttgatggagaacaaaagcttatttctgaggaagatcttaacggagaacaaaagcttatttctgaggaagatcttaacggttctgcttagacaactttgtataataaagttgtattcttctgtgcaatagcaacaatggaagattgggttcggtttcagttgttgccataccgtataaatgtgttcttaaagagagtctttttgtcgaggcttttcttcagttgggatgtatatgttttattaaggtgatgagtagtgatttggtgtgtcttttcaaatgctttgtggagtctgtttttccttataaaaatttattctaaatctggtttgtattttgggggtcttctttgctctttcttcattaacagaatactaattataagcttttcatatacaaaccttgaaaggaattttcatcagttactaattcgatttcagagaaatgaatcattcaaaacacttgattagagaaatgcttcttgaaccgggtcggtttaacgaaatccactggctggaaaaattatgcttttatatatataagaagcacccagctttcttgtacaaagtggttgataacagcgcttagagctctgccgagcacaattgatcggctaaatggtatggcaagaaaaggtatgcaatataataatcttttattgggtatgcaacgaaaatttgtttcgtcaacgtatgcaatattttttattaaaagagggtatgcaatgtattttattaaaaacgggtatgcaatataataatcttttattgggtatgcaacgaaaatttgtttcgtcaaagtatgcaatattttttattaaaagagggtatgcaatgtattttattaaaaacgggtatgcaataaaaaattatttggtttctctaaaaagtatgcagcacttattttttgataaggtatgcaacaaaattttactttgccgaaaatatgcaatgtttttgcgaataaattcaacgcacacttattacgtgggcgcgccttaattaaattaatggtaccggtgcgtttttatgcttgtagtattgtataatgtttttaagatccttaattaatagggataacagggtaatactagtggcgcgcctatttctgaattcccgatctagtaacatagatgacaccgcgcgcgataatttatcctagtttgcgcgctatattttgttttctatcgcgtattaaatgtataattgcgggactctaatcataaaaacccatctcataaataacgtcatgcattacatgttaattattacatgcttaacgtaattcaacagaaattatatgataatcatcgcaagaccggcaacaggattcaatcttaagaaactttattgccaaatgtttgaacgatcggggatcatccgggtctgtggcgggaactccacgaaaatatccgaacgcagcaagatatcgcggtgcatctcggtcttgcctgggcagtcgccgccgacgccgttgatgtggacgccgggcccgatcatattgtcgctcaggatcgtggcgttgtgcttgtcggccgttgctgtcgtaatgatatcggcaccttcgaccgcctgttccgcagagatcccgtgggcgaagaactccagcatgagatccccgcgctggaggatcatccagccggcgtcccggaaaacgattccgaagcccaacctttcatagaaggcggcggtggaatcgaaatctcgtgatggcaggttgggcgtcgcttggtcggtcatttcgaaccccagagtcccgctcagaagaactcgtcaagaaggcgatagaaggcgatgcgctgcgaatcgggagcggcgataccgtaaagcacgaggaagcggtcagcccattcgccgccaagctcttcagcaatatcacgggtagccaacgctatgtcctgatagcggtccgccacacccagccggccacagtcgatgaatccagaaaagcggccattttccaccatgatattcggcaagcaggcatcgccatgggtcacgacgagatcatcgccgtcgggcatgcgcgccttgagcctggcgaacagttcggctggcgcgagcccctgatgctcttcgtccagatcatcctgatcgacaagaccggcttccatccgagtacgtgctcgctcgatgcgatgtttcgcttggtggtcgaatgggcaggtagccggatcaagcgtatgcagccgccgcattgcatcagccatgatggatactttctcggcaggagcaaggtgagatgacaggagatcctgccccggcacttcgcccaatagcagccagtcccttcccgcttcagtgacaacgtcgagcacagctgcgcaaggaacgcccgtcgtggccagccacgatagccgcgctgcctcgtcctgcagttcattcagggcaccggacaggtcggtcttgacaaaaagaaccgggcgcccctgcgctgacagccggaacacggcggcatcagagcagccgattgtctgttgtgcccagtcatagccgaatagcctctccacccaagcggccggagaacctgcgtgcaatccatcttgttcaatcatgcgaaacgatccagatccggtgcagattatttggattgagagtgaatatgagactctaattggataccgaggggaatttatggaacgtcagtggagcatttttgacaagaaatatttgctagctgatagtgaccttaggcgacttttgaacgcgcaataatggtttctgacgtatgtgcttagctcattaaactccagaaacccgcggctgagtggctccttcaacgttgcggttctgtcagttccaaacgtaaaacggcttgtcccgcgtcatcggcgggggtcataacgtgactcccttaattctccgctcatgatgaattcagaaataaattcagcctaattcggcgttaattcagtacattaaaaacgtccgcaatgtgttattaagttgtctaagcgtcaatttgtttacaccacaatatatcctgccaccagccagccaacagctccccgaccggcagctcggcacaaaatcaccactcgatacaggcagcccatcagtccgggacggcgtcagcgggagagccgttgtaaggcggcagactttgctcatgttaccgatgctattcggaagaacggcaactaagctgccgggtttgaaacacggatgatctcgcggagggtagcatgttgattgtaacgatgacagagcgttgctgcctgtgatcaattcgggcacgaacccagtggacataagcctgttcggttcgtaagctgtaatgcaagtagcgtatgcgctcacgcaactggtccagaaccttgaccgaacgcagcggtggtaacggcgcagtggcggttttcatggcttgttatgactgtttttttggggtacagtctatgcctcgggcatccaagcagcaagcgcgttacgccgtgggtcgatgtttgatgttatggagcagcaacgatgttacgcagcagggcagtcgccctaaaacaaagttaaacatcatgggggaagcggtgatcgccgaagtatcgactcaactatcagaggtagttggcgtcatcgagcgccatctcgaaccgacgttgctggccgtacatttgtacggctccgcagtggatggcggcctgaagccacacagtgatattgatttgctggttacggtgaccgtaaggcttgatgaaacaacgcggcgagctttgatcaacgaccttttggaaacttcggcttcccctggagagagcgagattctccgcgctgtagaagtcaccattgttgtgcacgacgacatcattccgtggcgttatccagctaagcgcgaactgcaatttggagaatggcagcgcaatgacattcttgcaggtatcttcgagccagccacgatcgacattgatctggctatcttgctgacaaaagcaagagaacatagcgttgccttggtaggtccagcggcggaggaactctttgatccggttcctgaacaggatctatttgaggcgctaaatgaaaccttaacgctatggaactcgccgcccgactgggctggcgatgagcgaaatgtagtgcttacgttgtcccgcatttggtacagcgcagtaaccggcaaaatcgcgccgaaggatgtcgctgccgactgggcaatggagcgcctgccggcccagtatcagcccgtcatacttgaagctagacaggcttatcttggacaagaagaagatcgcttggcctcgcgcgcagatcagttggaagaatttgtccactacgtgaaaggcgagatcaccaaggtagtcggcaaataatgtctagctagaaattcgttcaagccgacgccgcttcgcggcgcggcttaactcaagcgttagatgcactaagcacataattgctcacagccaaactatcaggtcaagtctgcttttattatttttaagcgtgcataataagccctacacaaattgggagatatatcatgcatgaccaaaatcccttaacgtgagttttcgttccactgagcgtcagaccccgtagaaaagatcaaaggatcttcttgagatcctttttttctgcgcgtaatctgctgcttgcaaacaaaaaaaccaccgctaccagcggtggtttgtttgccggatcaagagctaccaactctttttccgaaggtaactggcttcagcagagcgcagataccaaatactgtccttctagtgtagccgtagttaggccaccacttcaagaactctgtagcaccgcctacatacctcgctctgctaatcctgttaccagtggctgctgccagtggcgataagtcgtgtcttaccgggttggactcaagacgatagttaccggataaggcgcagcggtcgggctgaacggggggttcgtgcacacagcccagcttggagcgaacgacctacaccgaactgagatacctacagcgtgagctatgagaaagcgccacgcttcccgaagggagaaaggcggacaggtatccggtaagcggcagggtcggaacaggagagcgcacgagggagcttccagggggaaacgcctggtatctttatagtcctgtcgggtttcgccacctctgacttgagcgtcgatttttgtgatgctcgtcaggggggcggagcctatggaaaaacgccagcaacgcggcctttttacggttcctggccttttgctggccttttgctcacatgttctttcctgcgttatcccctgattctgtggataaccgtattaccgcctttgagtgagctgataccgctcgccgcagccgaacgaccgagcgcagcgagtcagtgagcgaggaagcggaagagcgcctgatgcggtattttctccttacgcatctgtgcggtatttcacaccgcatatggtgcactctcagtacaatctgctctgatgccgcatagttaagccagtatacactccgctatcgctacgtgactgggtcatggctgcgccccgacacccgccaacacccgctgacgcgccctgacgggcttgtctgctcccggcatccgcttacagacaagctgtgaccgtctccgggagctgcatgtgtcagaggttttcaccgtcatcaccgaaacgcgcgaggcagggtgccttgatgtgggcgccggcggtcgagtggcgacggcgcggcttgtccgcgccctggtagattgcctggccgtaggccagccatttttgagcggccagcggccgcgataggccgacgcgaagcggcggggcgtagggagcgcagcgaccgaagggtaggcgctttttgcagctcttcggctgtgcgctggccagacagttatgcacaggccaggcgggttttaagagttttaataagttttaaagagttttaggcggaaaaatcgccttttttctcttttatatcagtcacttacatgtgtgaccggttcccaatgtacggctttgggttcccaatgtacgggttccggttcccaatgtacggctttgggttcccaatgtacgtgctatccacaggaaagagaccttttcgacctttttcccctgctagggcaatttgccctagcatctgctccgtacattaggaaccggcggatgcttcgccctcgatcaggttgcggtagcgcatgactaggatcgggccagcctgccccgcctcctccttcaaatcgtactccggcaggtcatttgacccgatcagcttgcgcacggtgaaacagaacttcttgaactctccggcgctgccactgcgttcgtagatcgtcttgaacaaccatctggcttctgccttgcctgcggcgcggcgtgccaggcggtagagaaaacggccgatgccgggatcgatcaaaaagtaatcggggtgaaccgtcagcacgtccgggttcttgccttctgtgatctcgcggtacatccaatcagctagctcgatctcgatgtactccggccgcccggtttcgctctttacgatcttgtagcggctaatcaaggcttcaccctcggataccgtcaccaggcggccgttcttggccttcttcgtacgctgcatggcaacgtgcgtggtgtttaaccgaatgcaggtttctaccaggtcgtctttctgctttccgccatcggctcgccggcagaacttgagtacgtccgcaacgtgtggacggaacacgcggccgggcttgtctcccttcccttcccggtatcggttcatggattcggttagatgggaaaccgccatcagtaccaggtcgtaatcccacacactggccatgccggccggccctgcggaaacctctacgtgcccgtctggaagctcgtagcggatcacctcgccagctcgtcggtcacgcttcgacagacggaaaacggccacgtccatgatgctgcgactatcgcgggtgcccacgtcatagagcatcggaacgaaaaaatctggttgctcgtcgcccttgggcggcttcctaatcgacggcgcaccggctgccggcggttgccgggattctttgcggattcgatcagcggccgcttgccacgattcaccggggcgtgcttctgcctcgatgcgttgccgctgggcggcctgcgcggccttcaacttctccaccaggtcatcacccagcgccgcgccgatttgtaccgggccggatggtttgcgaccgctcacgccgattcctcgggcttgggggttccagtgccattgcagggccggcagacaacccagccgcttacgcctggccaaccgcccgttcctccacacatggggcattccacggcgtcggtgcctggttgttcttgattttccatgccgcctcctttagccgctaaaattcatctactcatttattcatttgctcatttactctggtagctgcgcgatgtattcagatagcagctcggtaatggtcttgccttggcgtaccgcgtacatcttcagcttggtgtgatcctccgccggcaactgaaagttgacccgcttcatggctggcgtgtctgccaggctggccaacgttgcagccttgctgctgcgtgcgctcggacggccggcacttagcgtgtttgtgcttttgctcattttctctttacctcattaactcaaatgagttttgatttaatttcagcggccagcgcctggacctcgcgggcagcgtcgccctcgggttctgattcaagaacggttgtgccggcggcggcagtgcctgggtagctcacgcgctgcgtgatacgggactcaagaatgggcagctcgtacccggccagcgcctcggcaacctcaccgccgatgcgcgtgcctttgatcgcccgcgacacgacaaaggccgcttgtagccttccatccgtgacctcaatgcgctgcttaaccagctccaccaggtcggcggtggcccatatgtcgtaagggcttggctgcaccggaatcagcacgaagtcggctgccttgatcgcggacacagccaagtccgccgcctggggcgctccgtcgatcactacgaagtcgcgccggccgatggccttcacgtcgcggtcaatcgtcgggcggtcgatgccgacaacggttagcggttgatcttcccgcacggccgcccaatcgcgggcactgccctggggatcggaatcgactaacagaacatcggccccggcgagttgcagggcgcgggctagatgggttgcgatggtcgtcttgcctgacccgcctttctggttaagtacagcgataaccttcatgcgttccccttgcgtatttgtttatttactcatcgcatcatatacgcagcgaccgcatgacgcaagctgttttactcaaatacacatcacctttttagacggcggcgctcggtttcttcagcggccaagctggccggccaggccgccagcttggcatcagacaaaccggccaggatttcatgcagccgcacggttgagacgtgcgcgggcggctcgaacacgtacccggccgcgatcatctccgcctcgatctcttcggtaatgaaaaacggttcgtcctggccgtcctggtgcggtttcatgcttgttcctcttggcgttcattctcggcggccgccagggcgtcggcctcggtcaatgcgtcctcacggaaggcaccgcgccgcctggcctcggtgggcgtcacttcctcgctgcgctcaagtgcgcggtacagggtcgagcgatgcacgccaagcagtgcagccgcctctttcacggtgcggccttcctggtcgatcagctcgcgggcgtgcgcgatctgtgccggggtgagggtagggcgggggccaaacttcacgcctcgggccttggcggcctcgcgcccgctccgggtgcggtcgatgattagggaacgctcgaactcggcaatgccggcgaacacggtcaacaccatgcggccggccggcgtggtggtgtcggcccacggctctgccaggctacgcaggcccgcgccggcctcctggatgcgctcggcaatgtccagtaggtcgcgggtgctgcgggccaggcggtctagcctggtcactgtcacaacgtcgccagggcgtaggtggtcaagcatcctggccagctccgggcggtcgcgcctggtgccggtgatcttctcggaaaacagcttggtgcagccggccgcgtgcagttcggcccgttggttggtcaagtcctggtcgtcggtgctgacgcgggcatagcccagcaggccagcggcggcgctcttgttcatggcgtaatgtctccggttctagtcgcaagtattctactttatgcgactaaaacacgcgacaagaaaacgccaggaaaagggcagggcggcagcctgtcgcgtaacttaggacttgtgcgacatgtcgttttcagaagacggctgcactgaacgtcagaagccgactgcactatagcagcggaggggttggatcaaagtactttgatcccgaggggaaccctgtggttggcatgcacatacaaatggacgaacggataaaccttttcacgcccttttaaatatccgattattctaataaacgctcttttctcttag

SEQ ID NO: 61 - DNA, 12675 bp, Artificial Sequence
  Synthetic DNA vector
gtttacccgccaatatatcctgtcaaacactgatagtttaaactgaaggcgggaaacgacaatctgatccaagctcaagctgctctagcattcgccattcaggctgcgcaactgttgggaagggcgatcggtgcgggcctcttcgctattacgccagctggcgaaagggggatgtgctgcaaggcgattaagttgggtaacgccagggttttcccagtcacgacgttgtaaaacgacggccagtgccaagcttattaccctgttatccctaaccggtgcgtttttatgcttgtagtattgtataatgtttttaagatcccctgcaggcacgtaataagtgtgcgttgaatttattcgcaaaaacattgcatattttcggcaaagtaaaattttgttgcataccttatcaaaaaataagtgctgcatactttttagagaaaccaaataattttttattgcatacccgtttttaataaaatacattgcataccctcttttaataaaaaatattgcatactttgacgaaacaaattttcgttgcatacccaataaaagattattatattgcatacccgtttttaataaaatacattgcataccctcttttaataaaaaatattgcatacgttgacgaaacaaattttcgttgcatacccaataaaagattattatattgcataccttttcttgccataccatttagccgatcaattgtgctcggcatctagagttatcaacaagtttgtacaaaaaagcaggcttaaccgcttaatatcgtatgattagtattaaaaatcttctccagaatttcaacgttgtttttgctactcacgcattgtaccttaaatgatcttattcatcatttctaacaaaacaatttatgcattcttcgccagtagaagaacctagtagagtgctatcggcaacaactccgtcttgttcatgcggatgcaaaagaagacgtccatgcccacgtccacgtccatgtccacctccacgtccacactattcaagaaattatacagacccttgaaaaagaagaatgaagaagagaaaacaaggatcaattatgggattggtacaatatagttgagggtattgtctaatgtagtacttttgaatatgcttatagatttagacatattaaagactattttctccttttaaatcaatgaagaaaatacttgagttcaatccttcttttgcctttgcataaccgtctctcatccacaccaacaaaacaaatcccagaaccttcttttgcagaattttaaagacacacaaagcaatgaataagaacacttggtttacaataacgatcgaaactggtttacaataatgaccgaatatggtttgcaaatatagatgaattggaatttaattgattcgatctatatctaaaattaaatttcttgggttccctaaatactatcctcttagggtttagatttctattatcaaaactctcgtttaatttgagcaaattggttaatcggagaggttagggaaaacaacgttttctggtataaagagacgagagaaacggtattgatggagttaaaagtgatgatgttgatgaaatactgagtcaacgttaataaggcaagagccgactgtgagaagcaaggtttcatggttgggaattttgttgcgcaacggagaagatgaagtgaattttgttgcgcaacggatttccgcaagcttttcccgagaaaacaaagatatcatctacattctatttttgtgctgtaacttttctgaattttttgtaaacaattttttgtgatatatatatatatataaacaattttatatcattaagtatggtactctttaatgtttttaacggaacatgaccaaaactgctagtgaaagcattttgtcttaactttacaaaagaagttatcttttttttaacacaaactggttttcttcggtaaataaaaagactaagtttgtaaatttattcttagacaattatttactattattgccgactaatatgaaaatgcaaagaagtcgtatttggcattatccaaaagaagggacaaaacacttatctcttaaaacttaaattttaagccattcgtttaccaacaatgaatcttgtggctgatgtagaaaccgcgttcacttgtcaacatttagaaataatgttggctttcaaagaattaaatagaaacaaccaaaatgtatgaggttgagcgtcttctatatatttattacaagacttgcgatgaccaaaaacgcaacgaagaacgaaacaactttgtatacaaaagttgtaatgtgtgagagcttcaagagagaataccagctctgcgaggagatcggtcgaggccgcttcggcgtcgtctaccgctgctacaacccctcctccaccgaagattccgacactcctttggctgtcaagtccattgataagcgcctcttcctcgacgacgagaccgaccgtgagtgccttgacaaggaacccaaaatcctccaccttctctctcctcaccctaatattctgcagatccataacctctttgattctgatacccatctcctcattgttaccgatctctgccaagaggagaccctttacgaacgcattatctctaacggccccttctctgagcctgacgctgcggctattttctgtcagctcgccgaggccctcgctcactgccaccgcaactacgtcgctcaccgtgatatcaaaccagacaacatactattcgactcaaggaacaggctgaagctctgcgacttcggctcggccgagtggttcggagcaggagacagagagatgcgcggtgtggtaggaacaccctactacgtggcgccggaggtgctttccggaaaagactacaatgagaaggcggatgtgtggagtgctggtgttattctctacatcatgctcggtggagttccacccttctatggtgagactgttgaggagacttttgaggctgttcttaggggaaatcttcgctttccggccaggattttccgaaacgtttctactcaggcaagggatttgttgaggaagatgatgtgcaaggatgtttccagaaggttttctgctgaacaagtcttaaggcatccttgggtaaccagtggaggattggccaacatgaacccaacttttctatacaaagttgtaatggaaggaaagcctattcctaatcctcttcttggacttgattctacttgaacaactttgtataataaagttgtatactttgagtttgagttactctgtgttcgaattttaaagtatatgtggttttctgttttagtttcgtgtctcaactctcaagtgtagaggaatgttataaactactatgcaatgaaggaactaatacttatgatggtattttactaattatgttattattcataattccatgcattagagccaattgtcgcattttttttctttcagaattcttcaaacttgtcaaatcgaaatctcttctttagaagcgactagattagtttttttcttcaaaagaaattctctactgaatttataatttaaagagttcacgagctgcctactaaaatatgaaaaatatttatgaatccagcaatacaaattgtagctttgcaatacaagaaagaacaacttttcatagagatcaaaaacgctagataaaaaaaaaacggggaagactaactagtaagtaccacgagtataacacattttttggatttagtttctatgattgctttcgccacccagctttcttgtacaaagtggttgataacagcgcttagagctctgccgagcacaattgatcggctaaatggtatggcaagaaaaggtatgcaatataataatcttttattgggtatgcaacgaaaatttgtttcgtcaacgtatgcaatattttttattaaaagagggtatgcaatgtattttattaaaaacgggtatgcaatataataatcttttattgggtatgcaacgaaaatttgtttcgtcaaagtatgcaatattttttattaaaagagggtatgcaatgtattttattaaaaacgggtatgcaataaaaaattatttggtttctctaaaaagtatgcagcacttattttttgataaggtatgcaacaaaattttactttgccgaaaatatgcaatgtttttgcgaataaattcaacgcacacttattacgtgggcgcgccttaattaaattaatggtaccggtctaatacccaatctctcgtcttatccagatgttttatacgccttaattaatagggataacagggtaatactagtggcgcgcctatttctgaattcccgatctagtaacatagatgacaccgcgcgcgataatttatcctagtttgcgcgctatattttgttttctatcgcgtattaaatgtataattgcgggactctaatcataaaaacccatctcataaataacgtcatgcattacatgttaattattacatgcttaacgtaattcaacagaaattatatgataatcatcgcaagaccggcaacaggattcaatcttaagaaactttattgccaaatgtttgaacgatcggggatcatccgggtctgtggcgggaactccacgaaaatatccgaacgcagcaagatatcgcggtgcatctcggtcttgcctgggcagtcgccgccgacgccgttgatgtggacgccgggcccgatcatattgtcgctcaggatcgtggcgttgtgcttgtcggccgttgctgtcgtaatgatatcggcaccttcgaccgcctgttccgcagagatcccgtgggcgaagaactccagcatgagatccccgcgctggaggatcatccagccggcgtcccggaaaacgattccgaagcccaacctttcatagaaggcggcggtggaatcgaaatctcgtgatggcaggttgggcgtcgcttggtcggtcatttcgaaccccagagtcccgctcagaagaactcgtcaagaaggcgatagaaggcgatgcgctgcgaatcgggagcggcgataccgtaaagcacgaggaagcggtcagcccattcgccgccaagctcttcagcaatatcacgggtagccaacgctatgtcctgatagcggtccgccacacccagccggccacagtcgatgaatccagaaaagcggccattttccaccatgatattcggcaagcaggcatcgccatgggtcacgacgagatcatcgccgtcgggcatgcgcgccttgagcctggcgaacagttcggctggcgcgagcccctgatgctcttcgtccagatcatcctgatcgacaagaccggcttccatccgagtacgtgctcgctcgatgcgatgtttcgcttggtggtcgaatgggcaggtagccggatcaagcgtatgcagccgccgcattgcatcagccatgatggatactttctcggcaggagcaaggtgagatgacaggagatcctgccccggcacttcgcccaatagcagccagtcccttcccgcttcagtgacaacgtcgagcacagctgcgcaaggaacgcccgtcgtggccagccacgatagccgcgctgcctcgtcctgcagttcattcagggcaccggacaggtcggtcttgacaaaaagaaccgggcgcccctgcgctgacagccggaacacggcggcatcagagcagccgattgtctgttgtgcccagtcatagccgaatagcctctccacccaagcggccggagaacctgcgtgcaatccatcttgttcaatcatgcgaaacgatccagatccggtgcagattatttggattgagagtgaatatgagactctaattggataccgaggggaatttatggaacgtcagtggagcatttttgacaagaaatatttgctagctgatagtgaccttaggcgacttttgaacgcgcaataatggtttctgacgtatgtgcttagctcattaaactccagaaacccgcggctgagtggctccttcaacgttgcggttctgtcagttccaaacgtaaaacggcttgtcccgcgtcatcggcgggggtcataacgtgactcccttaattctccgctcatgatgaattcagaaataaattcagcctaattcggcgttaattcagtacattaaaaacgtccgcaatgtgttattaagttgtctaagcgtcaatttgtttacaccacaatatatcctgccaccagccagccaacagctccccgaccggcagctcggcacaaaatcaccactcgatacaggcagcccatcagtccgggacggcgtcagcgggagagccgttgtaaggcggcagactttgctcatgttaccgatgctattcggaagaacggcaactaagctgccgggtttgaaacacggatgatctcgcggagggtagcatgttgattgtaacgatgacagagcgttgctgcctgtgatcaattcgggcacgaacccagtggacataagcctgttcggttcgtaagctgtaatgcaagtagcgtatgcgctcacgcaactggtccagaaccttgaccgaacgcagcggtggtaacggcgcagtggcggttttcatggcttgttatgactgtttttttggggtacagtctatgcctcgggcatccaagcagcaagcgcgttacgccgtgggtcgatgtttgatgttatggagcagcaacgatgttacgcagcagggcagtcgccctaaaacaaagttaaacatcatgggggaagcggtgatcgccgaagtatcgactcaactatcagaggtagttggcgtcatcgagcgccatctcgaaccgacgttgctggccgtacatttgtacggctccgcagtggatggcggcctgaagccacacagtgatattgatttgctggttacggtgaccgtaaggcttgatgaaacaacgcggcgagctttgatcaacgaccttttggaaacttcggcttcccctggagagagcgagattctccgcgctgtagaagtcaccattgttgtgcacgacgacatcattccgtggcgttatccagctaagcgcgaactgcaatttggagaatggcagcgcaatgacattcttgcaggtatcttcgagccagccacgatcgacattgatctggctatcttgctgacaaaagcaagagaacatagcgttgccttggtaggtccagcggcggaggaactctttgatccggttcctgaacaggatctatttgaggcgctaaatgaaaccttaacgctatggaactcgccgcccgactgggctggcgatgagcgaaatgtagtgcttacgttgtcccgcatttggtacagcgcagtaaccggcaaaatcgcgccgaaggatgtcgctgccgactgggcaatggagcgcctgccggcccagtatcagcccgtcatacttgaagctagacaggcttatcttggacaagaagaagatcgcttggcctcgcgcgcagatcagttggaagaatttgtccactacgtgaaaggcgagatcaccaaggtagtcggcaaataatgtctagctagaaattcgttcaagccgacgccgcttcgcggcgcggcttaactcaagcgttagatgcactaagcacataattgctcacagccaaactatcaggtcaagtctgcttttattatttttaagcgtgcataataagccctacacaaattgggagatatatcatgcatgaccaaaatcccttaacgtgagttttcgttccactgagcgtcagaccccgtagaaaagatcaaaggatcttcttgagatcctttttttctgcgcgtaatctgctgcttgcaaacaaaaaaaccaccgctaccagcggtggtttgtttgccggatcaagagctaccaactctttttccgaaggtaactggcttcagcagagcgcagataccaaatactgtccttctagtgtagccgtagttaggccaccacttcaagaactctgtagcaccgcctacatacctcgctctgctaatcctgttaccagtggctgctgccagtggcgataagtcgtgtcttaccgggttggactcaagacgatagttaccggataaggcgcagcggtcgggctgaacggggggttcgtgcacacagcccagcttggagcgaacgacctacaccgaactgagatacctacagcgtgagctatgagaaagcgccacgcttcccgaagggagaaaggcggacaggtatccggtaagcggcagggtcggaacaggagagcgcacgagggagcttccagggggaaacgcctggtatctttatagtcctgtcgggtttcgccacctctgacttgagcgtcgatttttgtgatgctcgtcaggggggcggagcctatggaaaaacgccagcaacgcggcctttttacggttcctggccttttgctggccttttgctcacatgttctttcctgcgttatcccctgattctgtggataaccgtattaccgcctttgagtgagctgataccgctcgccgcagccgaacgaccgagcgcagcgagtcagtgagcgaggaagcggaagagcgcctgatgcggtattttctccttacgcatctgtgcggtatttcacaccgcatatggtgcactctcagtacaatctgctctgatgccgcatagttaagccagtatacactccgctatcgctacgtgactgggtcatggctgcgccccgacacccgccaacacccgctgacgcgccctgacgggcttgtctgctcccggcatccgcttacagacaagctgtgaccgtctccgggagctgcatgtgtcagaggttttcaccgtcatcaccgaaacgcgcgaggcagggtgccttgatgtgggcgccggcggtcgagtggcgacggcgcggcttgtccgcgccctggtagattgcctggccgtaggccagccatttttgagcggccagcggccgcgataggccgacgcgaagcggcggggcgtagggagcgcagcgaccgaagggtaggcgctttttgcagctcttcggctgtgcgctggccagacagttatgcacaggccaggcgggttttaagagttttaataagttttaaagagttttaggcggaaaaatcgccttttttctcttttatatcagtcacttacatgtgtgaccggttcccaatgtacggctttgggttcccaatgtacgggttccggttcccaatgtacggctttgggttcccaatgtacgtgctatccacaggaaagagaccttttcgacctttttcccctgctagggcaatttgccctagcatctgctccgtacattaggaaccggcggatgcttcgccctcgatcaggttgcggtagcgcatgactaggatcgggccagcctgccccgcctcctccttcaaatcgtactccggcaggtcatttgacccgatcagcttgcgcacggtgaaacagaacttcttgaactctccggcgctgccactgcgttcgtagatcgtcttgaacaaccatctggcttctgccttgcctgcggcgcggcgtgccaggcggtagagaaaacggccgatgccgggatcgatcaaaaagtaatcggggtgaaccgtcagcacgtccgggttcttgccttctgtgatctcgcggtacatccaatcagctagctcgatctcgatgtactccggccgcccggtttcgctctttacgatcttgtagcggctaatcaaggcttcaccctcggataccgtcaccaggcggccgttcttggccttcttcgtacgctgcatggcaacgtgcgtggtgtttaaccgaatgcaggtttctaccaggtcgtctttctgctttccgccatcggctcgccggcagaacttgagtacgtccgcaacgtgtggacggaacacgcggccgggcttgtctcccttcccttcccggtatcggttcatggattcggttagatgggaaaccgccatcagtaccaggtcgtaatcccacacactggccatgccggccggccctgcggaaacctctacgtgcccgtctggaagctcgtagcggatcacctcgccagctcgtcggtcacgcttcgacagacggaaaacggccacgtccatgatgctgcgactatcgcgggtgcccacgtcatagagcatcggaacgaaaaaatctggttgctcgtcgcccttgggcggcttcctaatcgacggcgcaccggctgccggcggttgccgggattctttgcggattcgatcagcggccgcttgccacgattcaccggggcgtgcttctgcctcgatgcgttgccgctgggcggcctgcgcggccttcaacttctccaccaggtcatcacccagcgccgcgccgatttgtaccgggccggatggtttgcgaccgctcacgccgattcctcgggcttgggggttccagtgccattgcagggccggcagacaacccagccgcttacgcctggccaaccgcccgttcctccacacatggggcattccacggcgtcggtgcctggttgttcttgattttccatgccgcctcctttagccgctaaaattcatctactcatttattcatttgctcatttactctggtagctgcgcgatgtattcagatagcagctcggtaatggtcttgccttggcgtaccgcgtacatcttcagcttggtgtgatcctccgccggcaactgaaagttgacccgcttcatggctggcgtgtctgccaggctggccaacgttgcagccttgctgctgcgtgcgctcggacggccggcacttagcgtgtttgtgcttttgctcattttctctttacctcattaactcaaatgagttttgatttaatttcagcggccagcgcctggacctcgcgggcagcgtcgccctcgggttctgattcaagaacggttgtgccggcggcggcagtgcctgggtagctcacgcgctgcgtgatacgggactcaagaatgggcagctcgtacccggccagcgcctcggcaacctcaccgccgatgcgcgtgcctttgatcgcccgcgacacgacaaaggccgcttgtagccttccatccgtgacctcaatgcgctgcttaaccagctccaccaggtcggcggtggcccatatgtcgtaagggcttggctgcaccggaatcagcacgaagtcggctgccttgatcgcggacacagccaagtccgccgcctggggcgctccgtcgatcactacgaagtcgcgccggccgatggccttcacgtcgcggtcaatcgtcgggcggtcgatgccgacaacggttagcggttgatcttcccgcacggccgcccaatcgcgggcactgccctggggatcggaatcgactaacagaacatcggccccggcgagttgcagggcgcgggctagatgggttgcgatggtcgtcttgcctgacccgcctttctggttaagtacagcgataaccttcatgcgttccccttgcgtatttgtttatttactcatcgcatcatatacgcagcgaccgcatgacgcaagctgttttactcaaatacacatcacctttttagacggcggcgctcggtttcttcagcggccaagctggccggccaggccgccagcttggcatcagacaaaccggccaggatttcatgcagccgcacggttgagacgtgcgcgggcggctcgaacacgtacccggccgcgatcatctccgcctcgatctcttcggtaatgaaaaacggttcgtcctggccgtcctggtgcggtttcatgcttgttcctcttggcgttcattctcggcggccgccagggcgtcggcctcggtcaatgcgtcctcacggaaggcaccgcgccgcctggcctcggtgggcgtcacttcctcgctgcgctcaagtgcgcggtacagggtcgagcgatgcacgccaagcagtgcagccgcctctttcacggtgcggccttcctggtcgatcagctcgcgggcgtgcgcgatctgtgccggggtgagggtagggcgggggccaaacttcacgcctcgggccttggcggcctcgcgcccgctccgggtgcggtcgatgattagggaacgctcgaactcggcaatgccggcgaacacggtcaacaccatgcggccggccggcgtggtggtgtcggcccacggctctgccaggctacgcaggcccgcgccggcctcctggatgcgctcggcaatgtccagtaggtcgcgggtgctgcgggccaggcggtctagcctggtcactgtcacaacgtcgccagggcgtaggtggtcaagcatcctggccagctccgggcggtcgcgcctggtgccggtgatcttctcggaaaacagcttggtgcagccggccgcgtgcagttcggcccgttggttggtcaagtcctggtcgtcggtgctgacgcgggcatagcccagcaggccagcggcggcgctcttgttcatggcgtaatgtctccggttctagtcgcaagtattctactttatgcgactaaaacacgcgacaagaaaacgccaggaaaagggcagggcggcagcctgtcgcgtaacttaggacttgtgcgacatgtcgttttcagaagacggctgcactgaacgtcagaagccgactgcactatagcagcggaggggttggatcaaagtactttgatcccgaggggaaccctgtggttggcatgcacatacaaatggacgaacggataaaccttttcacgcccttttaaatatccgattattctaataaacgctcttttctcttag

SEQ ID NO: 62 - DNA, 14460 bp, Artificial Sequence
  Synthetic DNA vector
gtttacccgccaatatatcctgtcaaacactgatagtttaaactgaaggcgggaaacgacaatctgatccaagctcaagctgctctagcattcgccattcaggctgcgcaactgttgggaagggcgatcggtgcgggcctcttcgctattacgccagctggcgaaagggggatgtgctgcaaggcgattaagttgggtaacgccagggttttcccagtcacgacgttgtaaaacgacggccagtgccaagcttattaccctgttatccctaaccggtctaatacccaatctctcgtcttatccagatgttttatacgcccctgcaggcacgtaataagtgtgcgttgaatttattcgcaaaaacattgcatattttcggcaaagtaaaattttgttgcataccttatcaaaaaataagtgctgcatactttttagagaaaccaaataattttttattgcatacccgtttttaataaaatacattgcataccctcttttaataaaaaatattgcatactttgacgaaacaaattttcgttgcatacccaataaaagattattatattgcatacccgtttttaataaaatacattgcataccctcttttaataaaaaatattgcatacgttgacgaaacaaattttcgttgcatacccaataaaagattattatattgcataccttttcttgccataccatttagccgatcaattgtgctcggcatctagagttatcaacaagtttgtacaaaaaagcaggcttactgaaatttagtagagaaaaatatatgtttttttctacatacagaatagtttgaatttttaaaatcggatttgaattttaaaaatagaaatagtgtttgtaagtaaaaaatatattgtactatttaagatgtatagaaataaaatattgttctatactattttcataactgatttgtaaatcaattttaattttagtatagagcaaaatgttttaaatataaagtaatagtgttggtagtggtgatgagatagtagtttatgttacgttaatatagcattataatcaattaaatgtttttgttggaaggatactaaaccctaagtggataatatattgggaacccaaagatttcaatctaaaatttaatattctttaaccatagaaaaatagaataatatatgtttgtcatcactaccaacataacgagtagcacagcacaagatagtctcttggtagaggaaagaagtggtagtagagaacaccgggtacaccatttgggttccacaatcgagggcacaaggagacacgaactcgccacacttaactagaaattgatgtaactccaaaaaaatccaaaattttacctttgtaaatcaaaacccccaattcaatttaatcacaaaccctagacgtcaattccaaaaattaaatgtattgattccgtcgccaatacatctccattgaacgttttcagaatccgaagctttacaaaaaggagatagtaatttttgggacccaaaaagctgttggaatgttaacagctgatgagaaagtgttttttggaaagagagaagaagaagaagaaaaagagcctgtatctcaggcaaagggtagcattgtcattattacagaaaatacaaataatatcagtatctttttgtgggatggttagttacttaattataatttttttgtagattaaaaactcaaatttctcaaaattatactctcctaagtagaaaaattttacaagtttgatttcttgaaaattgatattataatttatttttctgattagggtgggaagattctttataatttttttggtttacctgaaaatgaaagaaaagattgtaagaaagatacaacaagtgtagactggatcttttaaagtccaaaccaaaagccaaaaattaggtaacctaaatatgtaagactttattttttggtttttcttattaaaacaacatttcgataattcattatgatattttttacgctatgatcctcagccttaaactttcattcgtatagaaggataatatcataatagtacaactcttttaattgccaccaatcaactttattgtctgctttcaaaaattttattttttataaaatattattcattttagctataactcaatttggaacttttattcgtcccaaataaaatatctttccaagagagatggaaaaatagcttcatatagagatattttcaacaacttgtccctctctaaactcatccaccttccaaaacagagaaggggaaaatacaactttgtatacaaaagttgtaatgtcgactgtgaagctagataggcttacgtcgattgatgcccaattgaggctgcttgcacctaagaaggtctctgaggatgataaacttattgagtatgatgctttgctgctcgatcgcttccttgatattcttcaaaacttacatggggaagacatcaaagaaacggttcaagaattgtatgaacaatctgctgaatatgaaaggacacatgaccccaagaaattggaggagctgggaagcatggtgaccagtttggatgctggagattccattgtggttgccaaatcattttctcacatgcttaacctggctaaccttgctgaagaagtccagatttcccgtcgcaagagggtcaaaaaagtgaagaaaggagattttatggatgagaatactgcgatgactgagtcagatatggaagaaacactgcggaggcttattgtggatttgaagaaatccccacaagaaatttttgaaactttgaaaaaccagacagttgacttagttttcacagctcatcctacacaatctgttcgtagatccttgcttcaaaaacatggaaggataagggattgtttggcccaattgtatgccaaagacattactcccgatgataagcaggagcttgatgaggctctgcaaagagagatacaagctgcatttcgtactgatgaaatcaggaggactcagccaactccacaggatgagatgagagctgggatgagctacttccatgagacaatttggaatggtgttccaaaatttttgcgacgtcttgacacggcattgaagaacataggaataactgagcgtgttccctataatgcccctcttattcagttctcatcttggatgggtggtgatcgagatggaaatccgagagtaacacctgaagttactagggatgtatgtttattggctagaatgatggctgctaatatgtatttctcccagatagacgagctcatgtttgagctctcaatgtggagatgcaccgatgaacttcgtgaacgagcagaggaacttcacaaatattcaaagagagactccaaacactacattgagttttggaaacaaattccttccagtgagccttatcgtgttattcttgctgacgtgagggataagctctactatacacgtgaacgttctcgtcagttgttggcaagtgaggtctctgaaatccccgtcgaagcaaccttcaccgaaattgatcagtttctggagcctcttgagctttgctacagatctctctgtgcttgtggtgataggccagttgcggatggaagtcttcttgatttcatgcgacaagtagctacctttgggctttgtcttgtaaagcttgatattaggcaagaatcagagaggcatactgatgtgatggatgccattactacgcacctgggcattgggtcctaccgagactggacagaagagaagaggcaggattggctcttatctgagcttaggggcaagcgccctttgtttggccctgatcttcccagaactgatgaaattgctgatgttttggacacaataaatgtaatcgcagaactcccatctgatagtttcggcgcttatgttatctcgatggctactgccccttctgatgtgcttgctgttgagcttctgcaacgtgaatgtaaagttaaaaagcctttgagggttgttccattgtttgagaaacttgctgacctggaggctgctcctgcttctatgacccgcctattctccgtagattggtataaaaataggattgatgggaagcaagaagtcatgatcggatactctgattctggtaaggatgctggtcgtctctcagccgcttggcaaatgtacaaggttcaggaagagctgcttaaggtttctaagaaatttggggtgaagctcacaatgtttcatggacgaggaggaacggtgggaagaggagggggtcctactcatcttgctattttggcacagccagctgaaactattggtggatcacttcgtgttacaattcaaggtgaagtgattgaacaatcctttggagagcagcacttgtgttttagaacactccagcgttatacagctgctacacttgaacatgggatgaatccaccaaaatctcctaagccagaatggcgtgctctcttggaccagatggctgttgttgccacagaggaataccgctccatagtttttaaggagcctcgatttgtcgagtacttccgtctcgcaacgccagaaacggagtatgggcgcatgaacattgggagcaggccatcaaagagaaagccaagtggtggaattgaatctctccgtgcaatcccttggatctttgcatggactcaaactaggttccatctgcctgtgtggctgggcgttggcggagcacttaaacatgtccttgagaaagatataaggaaccataacatgcttagggacatgtacaacaatttccctttcttcagggtgaccattgatttgcttgaaatggtgttcgctaagggagaccctgaaattgccgctttatatgacaaactactggtgtcagaggagctgcagtcctttggggagcgtttgagggcaaattatgaagacactaaacgccgtctcctcgaggtcgctgggcataaagacctgctagagggagatccttacttgaaacagaggctccgccttcgtgatccctacatcacaaccctcaatgtctgccaagcgtataccctgaagcggattcgtgatcccgacttcaaggtaacagagaggccacacttatccaaggaaatcatggacgcacacaaggcagctgctgagctggtgaagctaaaccccactagtgagtatgctcctggacttgaagacacacttatcttaaccatgaagggtgttgctgctggtctgcagaacactggtaacccaacttttctatacaaagttgtaatgtctcatcatcatcatcatcatgcttagacaactttgtataataaagttgtagattcatagatcatatatatgtacatcatatccctctttagagcaggtactcgtgttcacctgcaaatgtaacaaagaacattatactatacaacaaatatacacattgaattatacctgtataaccaacataggtcaagattacatcatacgtgggctaggcccattttatattggcccaataagtgagtgactaaatcctttcgttcccaaatatatctccaccgatcaagagattcatcttccacccagctttcttgtacaaagtggttgataacagcgcttagagctctgccgagcacaattgatcggctaaatggtatggcaagaaaaggtatgcaatataataatcttttattgggtatgcaacgaaaatttgtttcgtcaacgtatgcaatattttttattaaaagagggtatgcaatgtattttattaaaaacgggtatgcaatataataatcttttattgggtatgcaacgaaaatttgtttcgtcaaagtatgcaatattttttattaaaagagggtatgcaatgtattttattaaaaacgggtatgcaataaaaaattatttggtttctctaaaaagtatgcagcacttattttttgataaggtatgcaacaaaattttactttgccgaaaatatgcaatgtttttgcgaataaattcaacgcacacttattacgtgggcgcgccttaattaaattaatggtaccggtgaattcccttatgtgagtgtaaaaggcaggcgagtttgtcccttaattaatagggataacagggtaatactagtggcgcgcctatttctgaattcccgatctagtaacatagatgacaccgcgcgcgataatttatcctagtttgcgcgctatattttgttttctatcgcgtattaaatgtataattgcgggactctaatcataaaaacccatctcataaataacgtcatgcattacatgttaattattacatgcttaacgtaattcaacagaaattatatgataatcatcgcaagaccggcaacaggattcaatcttaagaaactttattgccaaatgtttgaacgatcggggatcatccgggtctgtggcgggaactccacgaaaatatccgaacgcagcaagatatcgcggtgcatctcggtcttgcctgggcagtcgccgccgacgccgttgatgtggacgccgggcccgatcatattgtcgctcaggatcgtggcgttgtgcttgtcggccgttgctgtcgtaatgatatcggcaccttcgaccgcctgttccgcagagatcccgtgggcgaagaactccagcatgagatccccgcgctggaggatcatccagccggcgtcccggaaaacgattccgaagcccaacctttcatagaaggcggcggtggaatcgaaatctcgtgatggcaggttgggcgtcgcttggtcggtcatttcgaaccccagagtcccgctcagaagaactcgtcaagaaggcgatagaaggcgatgcgctgcgaatcgggagcggcgataccgtaaagcacgaggaagcggtcagcccattcgccgccaagctcttcagcaatatcacgggtagccaacgctatgtcctgatagcggtccgccacacccagccggccacagtcgatgaatccagaaaagcggccattttccaccatgatattcggcaagcaggcatcgccatgggtcacgacgagatcatcgccgtcgggcatgcgcgccttgagcctggcgaacagttcggctggcgcgagcccctgatgctcttcgtccagatcatcctgatcgacaagaccggcttccatccgagtacgtgctcgctcgatgcgatgtttcgcttggtggtcgaatgggcaggtagccggatcaagcgtatgcagccgccgcattgcatcagccatgatggatactttctcggcaggagcaaggtgagatgacaggagatcctgccccggcacttcgcccaatagcagccagtcccttcccgcttcagtgacaacgtcgagcacagctgcgcaaggaacgcccgtcgtggccagccacgatagccgcgctgcctcgtcctgcagttcattcagggcaccggacaggtcggtcttgacaaaaagaaccgggcgcccctgcgctgacagccggaacacggcggcatcagagcagccgattgtctgttgtgcccagtcatagccgaatagcctctccacccaagcggccggagaacctgcgtgcaatccatcttgttcaatcatgcgaaacgatccagatccggtgcagattatttggattgagagtgaatatgagactctaattggataccgaggggaatttatggaacgtcagtggagcatttttgacaagaaatatttgctagctgatagtgaccttaggcgacttttgaacgcgcaataatggtttctgacgtatgtgcttagctcattaaactccagaaacccgcggctgagtggctccttcaacgttgcggttctgtcagttccaaacgtaaaacggcttgtcccgcgtcatcggcgggggtcataacgtgactcccttaattctccgctcatgatgaattcagaaataaattcagcctaattcggcgttaattcagtacattaaaaacgtccgcaatgtgttattaagttgtctaagcgtcaatttgtttacaccacaatatatcctgccaccagccagccaacagctccccgaccggcagctcggcacaaaatcaccactcgatacaggcagcccatcagtccgggacggcgtcagcgggagagccgttgtaaggcggcagactttgctcatgttaccgatgctattcggaagaacggcaactaagctgccgggtttgaaacacggatgatctcgcggagggtagcatgttgattgtaacgatgacagagcgttgctgcctgtgatcaattcgggcacgaacccagtggacataagcctgttcggttcgtaagctgtaatgcaagtagcgtatgcgctcacgcaactggtccagaaccttgaccgaacgcagcggtggtaacggcgcagtggcggttttcatggcttgttatgactgtttttttggggtacagtctatgcctcgggcatccaagcagcaagcgcgttacgccgtgggtcgatgtttgatgttatggagcagcaacgatgttacgcagcagggcagtcgccctaaaacaaagttaaacatcatgggggaagcggtgatcgccgaagtatcgactcaactatcagaggtagttggcgtcatcgagcgccatctcgaaccgacgttgctggccgtacatttgtacggctccgcagtggatggcggcctgaagccacacagtgatattgatttgctggttacggtgaccgtaaggcttgatgaaacaacgcggcgagctttgatcaacgaccttttggaaacttcggcttcccctggagagagcgagattctccgcgctgtagaagtcaccattgttgtgcacgacgacatcattccgtggcgttatccagctaagcgcgaactgcaatttggagaatggcagcgcaatgacattcttgcaggtatcttcgagccagccacgatcgacattgatctggctatcttgctgacaaaagcaagagaacatagcgttgccttggtaggtccagcggcggaggaactctttgatccggttcctgaacaggatctatttgaggcgctaaatgaaaccttaacgctatggaactcgccgcccgactgggctggcgatgagcgaaatgtagtgcttacgttgtcccgcatttggtacagcgcagtaaccggcaaaatcgcgccgaaggatgtcgctgccgactgggcaatggagcgcctgccggcccagtatcagcccgtcatacttgaagctagacaggcttatcttggacaagaagaagatcgcttggcctcgcgcgcagatcagttggaagaatttgtccactacgtgaaaggcgagatcaccaaggtagtcggcaaataatgtctagctagaaattcgttcaagccgacgccgcttcgcggcgcggcttaactcaagcgttagatgcactaagcacataattgctcacagccaaactatcaggtcaagtctgcttttattatttttaagcgtgcataataagccctacacaaattgggagatatatcatgcatgaccaaaatcccttaacgtgagttttcgttccactgagcgtcagaccccgtagaaaagatcaaaggatcttcttgagatcctttttttctgcgcgtaatctgctgcttgcaaacaaaaaaaccaccgctaccagcggtggtttgtttgccggatcaagagctaccaactctttttccgaaggtaactggcttcagcagagcgcagataccaaatactgtccttctagtgtagccgtagttaggccaccacttcaagaactctgtagcaccgcctacatacctcgctctgctaatcctgttaccagtggctgctgccagtggcgataagtcgtgtcttaccgggttggactcaagacgatagttaccggataaggcgcagcggtcgggctgaacggggggttcgtgcacacagcccagcttggagcgaacgacctacaccgaactgagatacctacagcgtgagctatgagaaagcgccacgcttcccgaagggagaaaggcggacaggtatccggtaagcggcagggtcggaacaggagagcgcacgagggagcttccagggggaaacgcctggtatctttatagtcctgtcgggtttcgccacctctgacttgagcgtcgatttttgtgatgctcgtcaggggggcggagcctatggaaaaacgccagcaacgcggcctttttacggttcctggccttttgctggccttttgctcacatgttctttcctgcgttatcccctgattctgtggataaccgtattaccgcctttgagtgagctgataccgctcgccgcagccgaacgaccgagcgcagcgagtcagtgagcgaggaagcggaagagcgcctgatgcggtattttctccttacgcatctgtgcggtatttcacaccgcatatggtgcactctcagtacaatctgctctgatgccgcatagttaagccagtatacactccgctatcgctacgtgactgggtcatggctgcgccccgacacccgccaacacccgctgacgcgccctgacgggcttgtctgctcccggcatccgcttacagacaagctgtgaccgtctccgggagctgcatgtgtcagaggttttcaccgtcatcaccgaaacgcgcgaggcagggtgccttgatgtgggcgccggcggtcgagtggcgacggcgcggcttgtccgcgccctggtagattgcctggccgtaggccagccatttttgagcggccagcggccgcgataggccgacgcgaagcggcggggcgtagggagcgcagcgaccgaagggtaggcgctttttgcagctcttcggctgtgcgctggccagacagttatgcacaggccaggcgggttttaagagttttaataagttttaaagagttttaggcggaaaaatcgccttttttctcttttatatcagtcacttacatgtgtgaccggttcccaatgtacggctttgggttcccaatgtacgggttccggttcccaatgtacggctttgggttcccaatgtacgtgctatccacaggaaagagaccttttcgacctttttcccctgctagggcaatttgccctagcatctgctccgtacattaggaaccggcggatgcttcgccctcgatcaggttgcggtagcgcatgactaggatcgggccagcctgccccgcctcctccttcaaatcgtactccggcaggtcatttgacccgatcagcttgcgcacggtgaaacagaacttcttgaactctccggcgctgccactgcgttcgtagatcgtcttgaacaaccatctggcttctgccttgcctgcggcgcggcgtgccaggcggtagagaaaacggccgatgccgggatcgatcaaaaagtaatcggggtgaaccgtcagcacgtccgggttcttgccttctgtgatctcgcggtacatccaatcagctagctcgatctcgatgtactccggccgcccggtttcgctctttacgatcttgtagcggctaatcaaggcttcaccctcggataccgtcaccaggcggccgttcttggccttcttcgtacgctgcatggcaacgtgcgtggtgtttaaccgaatgcaggtttctaccaggtcgtctttctgctttccgccatcggctcgccggcagaacttgagtacgtccgcaacgtgtggacggaacacgcggccgggcttgtctcccttcccttcccggtatcggttcatggattcggttagatgggaaaccgccatcagtaccaggtcgtaatcccacacactggccatgccggccggccctgcggaaacctctacgtgcccgtctggaagctcgtagcggatcacctcgccagctcgtcggtcacgcttcgacagacggaaaacggccacgtccatgatgctgcgactatcgcgggtgcccacgtcatagagcatcggaacgaaaaaatctggttgctcgtcgcccttgggcggcttcctaatcgacggcgcaccggctgccggcggttgccgggattctttgcggattcgatcagcggccgcttgccacgattcaccggggcgtgcttctgcctcgatgcgttgccgctgggcggcctgcgcggccttcaacttctccaccaggtcatcacccagcgccgcgccgatttgtaccgggccggatggtttgcgaccgctcacgccgattcctcgggcttgggggttccagtgccattgcagggccggcagacaacccagccgcttacgcctggccaaccgcccgttcctccacacatggggcattccacggcgtcggtgcctggttgttcttgattttccatgccgcctcctttagccgctaaaattcatctactcatttattcatttgctcatttactctggtagctgcgcgatgtattcagatagcagctcggtaatggtcttgccttggcgtaccgcgtacatcttcagcttggtgtgatcctccgccggcaactgaaagttgacccgcttcatggctggcgtgtctgccaggctggccaacgttgcagccttgctgctgcgtgcgctcggacggccggcacttagcgtgtttgtgcttttgctcattttctctttacctcattaactcaaatgagttttgatttaatttcagcggccagcgcctggacctcgcgggcagcgtcgccctcgggttctgattcaagaacggttgtgccggcggcggcagtgcctgggtagctcacgcgctgcgtgatacgggactcaagaatgggcagctcgtacccggccagcgcctcggcaacctcaccgccgatgcgcgtgcctttgatcgcccgcgacacgacaaaggccgcttgtagccttccatccgtgacctcaatgcgctgcttaaccagctccaccaggtcggcggtggcccatatgtcgtaagggcttggctgcaccggaatcagcacgaagtcggctgccttgatcgcggacacagccaagtccgccgcctggggcgctccgtcgatcactacgaagtcgcgccggccgatggccttcacgtcgcggtcaatcgtcgggcggtcgatgccgacaacggttagcggttgatcttcccgcacggccgcccaatcgcgggcactgccctggggatcggaatcgactaacagaacatcggccccggcgagttgcagggcgcgggctagatgggttgcgatggtcgtcttgcctgacccgcctttctggttaagtacagcgataaccttcatgcgttccccttgcgtatttgtttatttactcatcgcatcatatacgcagcgaccgcatgacgcaagctgttttactcaaatacacatcacctttttagacggcggcgctcggtttcttcagcggccaagctggccggccaggccgccagcttggcatcagacaaaccggccaggatttcatgcagccgcacggttgagacgtgcgcgggcggctcgaacacgtacccggccgcgatcatctccgcctcgatctcttcggtaatgaaaaacggttcgtcctggccgtcctggtgcggtttcatgcttgttcctcttggcgttcattctcggcggccgccagggcgtcggcctcggtcaatgcgtcctcacggaaggcaccgcgccgcctggcctcggtgggcgtcacttcctcgctgcgctcaagtgcgcggtacagggtcgagcgatgcacgccaagcagtgcagccgcctctttcacggtgcggccttcctggtcgatcagctcgcgggcgtgcgcgatctgtgccggggtgagggtagggcgggggccaaacttcacgcctcgggccttggcggcctcgcgcccgctccgggtgcggtcgatgattagggaacgctcgaactcggcaatgccggcgaacacggtcaacaccatgcggccggccggcgtggtggtgtcggcccacggctctgccaggctacgcaggcccgcgccggcctcctggatgcgctcggcaatgtccagtaggtcgcgggtgctgcgggccaggcggtctagcctggtcactgtcacaacgtcgccagggcgtaggtggtcaagcatcctggccagctccgggcggtcgcgcctggtgccggtgatcttctcggaaaacagcttggtgcagccggccgcgtgcagttcggcccgttggttggtcaagtcctggtcgtcggtgctgacgcgggcatagcccagcaggccagcggcggcgctcttgttcatggcgtaatgtctccggttctagtcgcaagtattctactttatgcgactaaaacacgcgacaagaaaacgccaggaaaagggcagggcggcagcctgtcgcgtaacttaggacttgtgcgacatgtcgttttcagaagacggctgcactgaacgtcagaagccgactgcactatagcagcggaggggttggatcaaagtactttgatcccgaggggaaccctgtggttggcatgcacatacaaatggacgaacggataaaccttttcacgcccttttaaatatccgattattctaataaacgctcttttctcttag

SEQ ID NO: 63 - DNA, 12799 bp, Artificial Sequence
  Synthetic DNA vector
gtttacccgccaatatatcctgtcaaacactgatagtttaaactgaaggcgggaaacgacaatctgatccaagctcaagctgctctagcattcgccattcaggctgcgcaactgttgggaagggcgatcggtgcgggcctcttcgctattacgccagctggcgaaagggggatgtgctgcaaggcgattaagttgggtaacgccagggttttcccagtcacgacgttgtaaaacgacggccagtgccaagcttattaccctgttatccctaaccggtgaattcccttatgtgagtgtaaaaggcaggcgagtttgtccccctgcaggcacgtaataagtgtgcgttgaatttattcgcaaaaacattgcatattttcggcaaagtaaaattttgttgcataccttatcaaaaaataagtgctgcatactttttagagaaaccaaataattttttattgcatacccgtttttaataaaatacattgcataccctcttttaataaaaaatattgcatactttgacgaaacaaattttcgttgcatacccaataaaagattattatattgcatacccgtttttaataaaatacattgcataccctcttttaataaaaaatattgcatacgttgacgaaacaaattttcgttgcatacccaataaaagattattatattgcataccttttcttgccataccatttagccgatcaattgtgctcggcatctagagttatcaacaagtttgtacaaaaaagcaggcttaaaagaagagagaggaaggagaagagaagaaaaagaagagagacacaacggagcgccaagaggctgatgaacacgtcaccgtacacgtgtcatgatcttgaagggtttgcaaagggaacgcatatgctgagctggcaaccctagatctgcgctggacattttaaatatctgacttaaataatgattggtacacgtagtcataatcgccaccgttcatcttgagatctctacgtagacttgacgtgctgctgattttattccttttaaataatgaaaatacagaattaaactataatgtataattcatttgagatccacagatgacgaaacgtggactaccaaatcaagcatatttgtttttaccatttaatcgacggctaatattgatttcatctacggtaaaatatatctttttttaaccagaaaaaggttagagtggtccccactgtaggatctactgacttgtgtcggccgttagtggttttataaagctgacgtgtcccactgaataaggaataccgttgtggtccctacggacaacgtgggattcgacgccagctcattttttaattttttcttgaaatcttttttaaaattttagacgatgactcaatcttcgccacgtaggatccacccaataaaaaagggttaacaaaatcttatctttaatgctaaattagttgagattaatccatgttgtttaaatccgaaatgatgcatataatcttgtttcttataatcattaagatttagactgaagatctaattccaatttaagagagtcactaaaaaaagaatgaattcaatttcagacaaatccgacaaggtcaaggtgacgtgttcttgatgccaattctagtgggagccacttgacgcgtgcagttagactcccggtccaagacataaatttacgttaataccctcctttattgggttattattgggccgtagttgaattattagacccaacctttttatcctgttcttgattggcacatactttgcaaaaagttaacaaaataacttttattgcaaggcattacaagagaaatgtcaaatttggttgttgcatacatgacatcttattcatatccaatccataaattgatgtgttgttattcaaactggtcttttgatgtattgttagacatatctcatatatattgaacccttggaatcaatataatagattgggctttatttatcttttattgggcttaaagggaattgttggactaaaaaaaccattaaggctataacacactaattacacgtacaatgagagtgagagtcacggacgggatgattacaagaatcatatagcaccaaatatctcatcctcactctcacatacaaacacacattttgttcacacagagatagacacaactttgtatacaaaagttgtaatggccgttgaacctcttcgcgttcttgtcaccggcgccgccgggcaaattgggtatgctctcgttcccatgattgctaggggaataatgctgggtgctaatcagcctgtgatcttgcacatgctcgatattcctccagcagccgaggcattgaacggagtgaaaatggagctggtggatgctgcctttccacttcttaaaggcgttgttgctacaaccgatgctgctgaagcctgcaaaggtgtaaatgttgctgtcatggttggtggcttcccaaggaaagaaggcatggagaggaaggatgtgatgtcaaagaatgtttccatctacaaggctcaagcttctgctcttgagcaacatgctgctcccaattgcaaggttttggttgttgccaaccctgccaacaccaatgctttgatcctaaaggaatttgccccatcaatcccggagaagaacatttcttgtttgacaaggcttgaccacaacagagctctaggtcagatctcagagagattgaatgttcaagtctctgatgttaagaatgtgattatttggggaaaccactcctcaactcaataccctgatgtcaaccacgctaccgtgaaaacacagggtgttgataagcctgttcgtgagcttgttgctgatgatgcatggttgaatggagagttcataacaactgtgcaacagcgtggagctgccatcatcaaggcaaggaagctctccagtgcattgtcagctgctagttctgcttgtgatcacatccatgattgggtgcttggaaccccagagggaacatgggtatctatgggtgtgtattctgatggctcgtacaatgtgccagctggaatcatttactccttcccagtaacttgtaaaaatggagaatggacaatcgtccaagggctgccaattgacgatgactcaaggaagaaaatggatgcaactgctgcagagcttgtcgaggagaagacattggcctactcatgcctgactaacccaacttttctatacaaagttgtaatggctggatctactggagcttcttggtctcatcctcaatttgaaaagggaggaggttctggaggtggatctggtggaggatcatggtctcatccacagttcgaaaagggagctggatctaggcctatttgaacaactttgtataataaagttgtactttgtataagatcattagttgttaattttttaaatatgaatttctaaactatccaccaactaagcatgttgtgacaagcaaaagtatatagataattagatattatatgtatatgtttaaaattgcgtaatatgctttacaggtcgattgttctcctaatcatttgattcttcttaatttattggattacgaaatgacatttctttgtcacctttttcgtgcatatcagatttgtttaaagtttacgtgacgaatgacgattgatcttttatcttgttgtgccgccgtattttgtatggacattacttgtaatactatatatatcagctatgcgttaactatactcatcaaataccacatatgatttattatatcaaagtacttattaataaataattaaattaaccttatattcaattgcacttgggtgagaaagccgttagaaaaaactcccgctatagaagaaatgtggtagatttgaaccgaaattaaatattttcacccagctttcttgtacaaagtggttgataacagcgcttagagctctgccgagcacaattgatcggctaaatggtatggcaagaaaaggtatgcaatataataatcttttattgggtatgcaacgaaaatttgtttcgtcaacgtatgcaatattttttattaaaagagggtatgcaatgtattttattaaaaacgggtatgcaatataataatcttttattgggtatgcaacgaaaatttgtttcgtcaaagtatgcaatattttttattaaaagagggtatgcaatgtattttattaaaaacgggtatgcaataaaaaattatttggtttctctaaaaagtatgcagcacttattttttgataaggtatgcaacaaaattttactttgccgaaaatatgcaatgtttttgcgaataaattcaacgcacacttattacgtgggcgcgccttaattaaattaatggtaccggttgcttgcaaaagcagtaattggaaagcactctcaaagaatccttaattaatagggataacagggtaatactagtggcgcgcctatttctgaattcccgatctagtaacatagatgacaccgcgcgcgataatttatcctagtttgcgcgctatattttgttttctatcgcgtattaaatgtataattgcgggactctaatcataaaaacccatctcataaataacgtcatgcattacatgttaattattacatgcttaacgtaattcaacagaaattatatgataatcatcgcaagaccggcaacaggattcaatcttaagaaactttattgccaaatgtttgaacgatcggggatcatccgggtctgtggcgggaactccacgaaaatatccgaacgcagcaagatatcgcggtgcatctcggtcttgcctgggcagtcgccgccgacgccgttgatgtggacgccgggcccgatcatattgtcgctcaggatcgtggcgttgtgcttgtcggccgttgctgtcgtaatgatatcggcaccttcgaccgcctgttccgcagagatcccgtgggcgaagaactccagcatgagatccccgcgctggaggatcatccagccggcgtcccggaaaacgattccgaagcccaacctttcatagaaggcggcggtggaatcgaaatctcgtgatggcaggttgggcgtcgcttggtcggtcatttcgaaccccagagtcccgctcagaagaactcgtcaagaaggcgatagaaggcgatgcgctgcgaatcgggagcggcgataccgtaaagcacgaggaagcggtcagcccattcgccgccaagctcttcagcaatatcacgggtagccaacgctatgtcctgatagcggtccgccacacccagccggccacagtcgatgaatccagaaaagcggccattttccaccatgatattcggcaagcaggcatcgccatgggtcacgacgagatcatcgccgtcgggcatgcgcgccttgagcctggcgaacagttcggctggcgcgagcccctgatgctcttcgtccagatcatcctgatcgacaagaccggcttccatccgagtacgtgctcgctcgatgcgatgtttcgcttggtggtcgaatgggcaggtagccggatcaagcgtatgcagccgccgcattgcatcagccatgatggatactttctcggcaggagcaaggtgagatgacaggagatcctgccccggcacttcgcccaatagcagccagtcccttcccgcttcagtgacaacgtcgagcacagctgcgcaaggaacgcccgtcgtggccagccacgatagccgcgctgcctcgtcctgcagttcattcagggcaccggacaggtcggtcttgacaaaaagaaccgggcgcccctgcgctgacagccggaacacggcggcatcagagcagccgattgtctgttgtgcccagtcatagccgaatagcctctccacccaagcggccggagaacctgcgtgcaatccatcttgttcaatcatgcgaaacgatccagatccggtgcagattatttggattgagagtgaatatgagactctaattggataccgaggggaatttatggaacgtcagtggagcatttttgacaagaaatatttgctagctgatagtgaccttaggcgacttttgaacgcgcaataatggtttctgacgtatgtgcttagctcattaaactccagaaacccgcggctgagtggctccttcaacgttgcggttctgtcagttccaaacgtaaaacggcttgtcccgcgtcatcggcgggggtcataacgtgactcccttaattctccgctcatgatgaattcagaaataaattcagcctaattcggcgttaattcagtacattaaaaacgtccgcaatgtgttattaagttgtctaagcgtcaatttgtttacaccacaatatatcctgccaccagccagccaacagctccccgaccggcagctcggcacaaaatcaccactcgatacaggcagcccatcagtccgggacggcgtcagcgggagagccgttgtaaggcggcagactttgctcatgttaccgatgctattcggaagaacggcaactaagctgccgggtttgaaacacggatgatctcgcggagggtagcatgttgattgtaacgatgacagagcgttgctgcctgtgatcaattcgggcacgaacccagtggacataagcctgttcggttcgtaagctgtaatgcaagtagcgtatgcgctcacgcaactggtccagaaccttgaccgaacgcagcggtggtaacggcgcagtggcggttttcatggcttgttatgactgtttttttggggtacagtctatgcctcgggcatccaagcagcaagcgcgttacgccgtgggtcgatgtttgatgttatggagcagcaacgatgttacgcagcagggcagtcgccctaaaacaaagttaaacatcatgggggaagcggtgatcgccgaagtatcgactcaactatcagaggtagttggcgtcatcgagcgccatctcgaaccgacgttgctggccgtacatttgtacggctccgcagtggatggcggcctgaagccacacagtgatattgatttgctggttacggtgaccgtaaggcttgatgaaacaacgcggcgagctttgatcaacgaccttttggaaacttcggcttcccctggagagagcgagattctccgcgctgtagaagtcaccattgttgtgcacgacgacatcattccgtggcgttatccagctaagcgcgaactgcaatttggagaatggcagcgcaatgacattcttgcaggtatcttcgagccagccacgatcgacattgatctggctatcttgctgacaaaagcaagagaacatagcgttgccttggtaggtccagcggcggaggaactctttgatccggttcctgaacaggatctatttgaggcgctaaatgaaaccttaacgctatggaactcgccgcccgactgggctggcgatgagcgaaatgtagtgcttacgttgtcccgcatttggtacagcgcagtaaccggcaaaatcgcgccgaaggatgtcgctgccgactgggcaatggagcgcctgccggcccagtatcagcccgtcatacttgaagctagacaggcttatcttggacaagaagaagatcgcttggcctcgcgcgcagatcagttggaagaatttgtccactacgtgaaaggcgagatcaccaaggtagtcggcaaataatgtctagctagaaattcgttcaagccgacgccgcttcgcggcgcggcttaactcaagcgttagatgcactaagcacataattgctcacagccaaactatcaggtcaagtctgcttttattatttttaagcgtgcataataagccctacacaaattgggagatatatcatgcatgaccaaaatcccttaacgtgagttttcgttccactgagcgtcagaccccgtagaaaagatcaaaggatcttcttgagatcctttttttctgcgcgtaatctgctgcttgcaaacaaaaaaaccaccgctaccagcggtggtttgtttgccggatcaagagctaccaactctttttccgaaggtaactggcttcagcagagcgcagataccaaatactgtccttctagtgtagccgtagttaggccaccacttcaagaactctgtagcaccgcctacatacctcgctctgctaatcctgttaccagtggctgctgccagtggcgataagtcgtgtcttaccgggttggactcaagacgatagttaccggataaggcgcagcggtcgggctgaacggggggttcgtgcacacagcccagcttggagcgaacgacctacaccgaactgagatacctacagcgtgagctatgagaaagcgccacgcttcccgaagggagaaaggcggacaggtatccggtaagcggcagggtcggaacaggagagcgcacgagggagcttccagggggaaacgcctggtatctttatagtcctgtcgggtttcgccacctctgacttgagcgtcgatttttgtgatgctcgtcaggggggcggagcctatggaaaaacgccagcaacgcggcctttttacggttcctggccttttgctggccttttgctcacatgttctttcctgcgttatcccctgattctgtggataaccgtattaccgcctttgagtgagctgataccgctcgccgcagccgaacgaccgagcgcagcgagtcagtgagcgaggaagcggaagagcgcctgatgcggtattttctccttacgcatctgtgcggtatttcacaccgcatatggtgcactctcagtacaatctgctctgatgccgcatagttaagccagtatacactccgctatcgctacgtgactgggtcatggctgcgccccgacacccgccaacacccgctgacgcgccctgacgggcttgtctgctcccggcatccgcttacagacaagctgtgaccgtctccgggagctgcatgtgtcagaggttttcaccgtcatcaccgaaacgcgcgaggcagggtgccttgatgtgggcgccggcggtcgagtggcgacggcgcggcttgtccgcgccctggtagattgcctggccgtaggccagccatttttgagcggccagcggccgcgataggccgacgcgaagcggcggggcgtagggagcgcagcgaccgaagggtaggcgctttttgcagctcttcggctgtgcgctggccagacagttatgcacaggccaggcgggttttaagagttttaataagttttaaagagttttaggcggaaaaatcgccttttttctcttttatatcagtcacttacatgtgtgaccggttcccaatgtacggctttgggttcccaatgtacgggttccggttcccaatgtacggctttgggttcccaatgtacgtgctatccacaggaaagagaccttttcgacctttttcccctgctagggcaatttgccctagcatctgctccgtacattaggaaccggcggatgcttcgccctcgatcaggttgcggtagcgcatgactaggatcgggccagcctgccccgcctcctccttcaaatcgtactccggcaggtcatttgacccgatcagcttgcgcacggtgaaacagaacttcttgaactctccggcgctgccactgcgttcgtagatcgtcttgaacaaccatctggcttctgccttgcctgcggcgcggcgtgccaggcggtagagaaaacggccgatgccgggatcgatcaaaaagtaatcggggtgaaccgtcagcacgtccgggttcttgccttctgtgatctcgcggtacatccaatcagctagctcgatctcgatgtactccggccgcccggtttcgctctttacgatcttgtagcggctaatcaaggcttcaccctcggataccgtcaccaggcggccgttcttggccttcttcgtacgctgcatggcaacgtgcgtggtgtttaaccgaatgcaggtttctaccaggtcgtctttctgctttccgccatcggctcgccggcagaacttgagtacgtccgcaacgtgtggacggaacacgcggccgggcttgtctcccttcccttcccggtatcggttcatggattcggttagatgggaaaccgccatcagtaccaggtcgtaatcccacacactggccatgccggccggccctgcggaaacctctacgtgcccgtctggaagctcgtagcggatcacctcgccagctcgtcggtcacgcttcgacagacggaaaacggccacgtccatgatgctgcgactatcgcgggtgcccacgtcatagagcatcggaacgaaaaaatctggttgctcgtcgcccttgggcggcttcctaatcgacggcgcaccggctgccggcggttgccgggattctttgcggattcgatcagcggccgcttgccacgattcaccggggcgtgcttctgcctcgatgcgttgccgctgggcggcctgcgcggccttcaacttctccaccaggtcatcacccagcgccgcgccgatttgtaccgggccggatggtttgcgaccgctcacgccgattcctcgggcttgggggttccagtgccattgcagggccggcagacaacccagccgcttacgcctggccaaccgcccgttcctccacacatggggcattccacggcgtcggtgcctggttgttcttgattttccatgccgcctcctttagccgctaaaattcatctactcatttattcatttgctcatttactctggtagctgcgcgatgtattcagatagcagctcggtaatggtcttgccttggcgtaccgcgtacatcttcagcttggtgtgatcctccgccggcaactgaaagttgacccgcttcatggctggcgtgtctgccaggctggccaacgttgcagccttgctgctgcgtgcgctcggacggccggcacttagcgtgtttgtgcttttgctcattttctctttacctcattaactcaaatgagttttgatttaatttcagcggccagcgcctggacctcgcgggcagcgtcgccctcgggttctgattcaagaacggttgtgccggcggcggcagtgcctgggtagctcacgcgctgcgtgatacgggactcaagaatgggcagctcgtacccggccagcgcctcggcaacctcaccgccgatgcgcgtgcctttgatcgcccgcgacacgacaaaggccgcttgtagccttccatccgtgacctcaatgcgctgcttaaccagctccaccaggtcggcggtggcccatatgtcgtaagggcttggctgcaccggaatcagcacgaagtcggctgccttgatcgcggacacagccaagtccgccgcctggggcgctccgtcgatcactacgaagtcgcgccggccgatggccttcacgtcgcggtcaatcgtcgggcggtcgatgccgacaacggttagcggttgatcttcccgcacggccgcccaatcgcgggcactgccctggggatcggaatcgactaacagaacatcggccccggcgagttgcagggcgcgggctagatgggttgcgatggtcgtcttgcctgacccgcctttctggttaagtacagcgataaccttcatgcgttccccttgcgtatttgtttatttactcatcgcatcatatacgcagcgaccgcatgacgcaagctgttttactcaaatacacatcacctttttagacggcggcgctcggtttcttcagcggccaagctggccggccaggccgccagcttggcatcagacaaaccggccaggatttcatgcagccgcacggttgagacgtgcgcgggcggctcgaacacgtacccggccgcgatcatctccgcctcgatctcttcggtaatgaaaaacggttcgtcctggccgtcctggtgcggtttcatgcttgttcctcttggcgttcattctcggcggccgccagggcgtcggcctcggtcaatgcgtcctcacggaaggcaccgcgccgcctggcctcggtgggcgtcacttcctcgctgcgctcaagtgcgcggtacagggtcgagcgatgcacgccaagcagtgcagccgcctctttcacggtgcggccttcctggtcgatcagctcgcgggcgtgcgcgatctgtgccggggtgagggtagggcgggggccaaacttcacgcctcgggccttggcggcctcgcgcccgctccgggtgcggtcgatgattagggaacgctcgaactcggcaatgccggcgaacacggtcaacaccatgcggccggccggcgtggtggtgtcggcccacggctctgccaggctacgcaggcccgcgccggcctcctggatgcgctcggcaatgtccagtaggtcgcgggtgctgcgggccaggcggtctagcctggtcactgtcacaacgtcgccagggcgtaggtggtcaagcatcctggccagctccgggcggtcgcgcctggtgccggtgatcttctcggaaaacagcttggtgcagccggccgcgtgcagttcggcccgttggttggtcaagtcctggtcgtcggtgctgacgcgggcatagcccagcaggccagcggcggcgctcttgttcatggcgtaatgtctccggttctagtcgcaagtattctactttatgcgactaaaacacgcgacaagaaaacgccaggaaaagggcagggcggcagcctgtcgcgtaacttaggacttgtgcgacatgtcgttttcagaagacggctgcactgaacgtcagaagccgactgcactatagcagcggaggggttggatcaaagtactttgatcccgaggggaaccctgtggttggcatgcacatacaaatggacgaacggataaaccttttcacgcccttttaaatatccgattattctaataaacgctcttttctcttag

SEQ ID NO: 64 - DNA, 13071 bp, Artificial Sequence
  Synthetic DNA vector
gtttacccgccaatatatcctgtcaaacactgatagtttaaactgaaggcgggaaacgacaatctgatccaagctcaagctgctctagcattcgccattcaggctgcgcaactgttgggaagggcgatcggtgcgggcctcttcgctattacgccagctggcgaaagggggatgtgctgcaaggcgattaagttgggtaacgccagggttttcccagtcacgacgttgtaaaacgacggccagtgccaagcttattaccctgttatccctaaccggttgcttgcaaaagcagtaattggaaagcactctcaaagaatcccctgcaggcacgtaataagtgtgcgttgaatttattcgcaaaaacattgcatattttcggcaaagtaaaattttgttgcataccttatcaaaaaataagtgctgcatactttttagagaaaccaaataattttttattgcatacccgtttttaataaaatacattgcataccctcttttaataaaaaatattgcatactttgacgaaacaaattttcgttgcatacccaataaaagattattatattgcatacccgtttttaataaaatacattgcataccctcttttaataaaaaatattgcatacgttgacgaaacaaattttcgttgcatacccaataaaagattattatattgcataccttttcttgccataccatttagccgatcaattgtgctcggcatctagagttatcaacaagtttgtacaaaaaagcaggcttactctttctaatttcaggttataatttattaattttggcggagtaaaagtagatgaccgttacaagtctgatttattagactgtgaaattggaccgttgttatgtgggccatggcttttattaaaaaaagaagagaaggtatattatttaaattggagataatgggccgttttaaacccaattattattggtccactaaagtttttatatcctctaacttcgacgagcttgatatagttttggaccttttggtgtgaacggtcacattcaactaaattaaaaagtccaacaaacaaaatctggtcatgaaaagcttggtgtgatgtttctaataagtaaatttactgaggttaattggttggtttaacttaaatgtaatccaaactcctctccctttagagattttcagttgggaatgaaaacctttaaagcttgcaccctaaaatgacattaatggttatagatatagtttgttttcatgtttcttttttttttatattttcctttagttttttctagggttgggactaaataatcggactcggatccgagatccgatttgaaaagctggatacccaattgggatggatccgcttccggatcctgaatttttagattcagatgaatatttttttttaaactaaagaaagcatatcagcatcacatttttgtggtgatactgcttcaagaatctgtcacatatctgtccaaaagaaaagaatttgtcacatattgtataattttaatatatttattgttttagtttgaaaacaaacgtggaaaaaaacatcttacaggtgtcaggtgtgccgcgtcgtcccactcaaagcctatatcatcaattttctggctgttctaatctactcaatttatttttttattgttaatttactgaagatcggcgacaactttgtatacaaaagttgtaatggcggggaaattcggatcactgaggcagagtttcattgaaagaagcaaagagaggttgctatctcgaagagggtattcggagctagggttacctggctccgatggtgatgttgaagatgagggcaatagcgatgtcaaatgcggttgtttccgatcaatttgcggcgggagaagtcgaaattccgatagcggaaatcgatctaagggcggatgttaccggtggatttgtgatcggatattagggttctgtaatgggtttaaggaagttgcaggtaaattttatgagatgggtcgatctgatcctcgaaaggtgttctttgcagcgaagatgggtgggagcttagctttggtttcaatgctcatcttcttgaggggacctttatcggatattcgtcagtatgctatttgggctattttaactgtcattgtctgtttcgagtacagcgtaggagcatgtcttagtaaaggccttaaccgtggtctgggaacggtaactgctggaagtattgctttcgggctagcagaattagcagttcggtctggtgaatacaaagaaccgctcattattatgtatatgttcttcgcaggttctattgcgacctacattaaattatacccaacaatgaaagaatacgaatatgggtttcgggtattccttatgacatttgccatagtaatggtgactggaaataaaacaacaaattttttccaaactgcttttttccggttgttgcttatttcaattggtgctgtcatagcttcagtggttaacatatgtgtttaccctatttggtctggcaccgatcttcataaggtggtggtgaaaaatttcaagggtgttgctacttctttggaaggctgtttaaatggatacttgcagtgtgtagcgtatgataaaatcccttcaaagattcttacgtaccaagcttatgatgaccctacatatggtggctatagaacagctgtccagtcagcaagtcaagaagaaactctgttgagctttgcgaaatgggagcctcctcatggcccttatagatcatgcaattatccttgggaatcctatgttaaagttagtggggcactgagacattgtgcttttatggttatggcaatgcatggatgcattcttgcagaaatacaggcaccaccagagaagagacaggtttttgccgatgaacttcgcagggttggcatggccggtgctaaagtcatacgtgaacttgggaacaaagttgagaaaatggagaaactaagccccggtgatatacttgcagaagtacatacggcagcagaggagctgcaaatgagaatcgatgagaagtcttatctcctggtcaatttcgagaaatgggaagaaggcaaacgaccaaaggaatttgatgaccctgagcgtgtttctcaaatgaagagttatggaagtggtcagcttgttataaactccctaagtgaagcagtgctaagtattgaacccgagcagatgcaatcatacattgataatatgagttcaagggtttcaatgattggtgctggcccttcattgcaaggtatgttttccactgatagtatggcgactagaactcagtggccttcacgtctttcactcctaccagacctgagcatcaatgaaaaggaagcgaaaacatatgagagcgcaagctccttgtcactagcaacttttgcttcacttctagtagaatttgtggcaagacttggatatttggtggaggcctttgaggaactcagtgagaaagcagctttcaaggagcaaagtgagctagaagacgaaaaggcgagtaatgggctctggcataagttgatggtgtcccttcagttcagaaataacccaacttttctatacaaagttgtaatggcttctatgactggtggacagcaaatgggtgcttagacaactttgtataataaagttgtaaggttgaagaataagaattaaaaaattgtatttaaactataaaatatgcatacataataaattttgatcgtttttaactaataaaacatatggtgtatcatttcaatctcacatgaattaaatcttggtgtgtatagactatacagtatagtagtttgttttgtaaaccgaaatcagaacactggctgctggccggtttacttaatttatgaatctatatatacatttttgcagtcattttgtgaaataaatcctgtagttgggacttatttacaatggctgccactggattttaatgtttgtttttgataattagaaaaaaaatcttcgaattaaatattttacatttaacaatcttccctaaatctctccacattaactacacggttagttactaaaattaaacttccaaaatatttaatatcatttaattactacaaaattatcatttttgatattgtttttctccatgactataacaattcgactataatcatcaacacccagctttcttgtacaaagtggttgataacagcgcttagagctctgccgagcacaattgatcggctaaatggtatggcaagaaaaggtatgcaatataataatcttttattgggtatgcaacgaaaatttgtttcgtcaacgtatgcaatattttttattaaaagagggtatgcaatgtattttattaaaaacgggtatgcaatataataatcttttattgggtatgcaacgaaaatttgtttcgtcaaagtatgcaatattttttattaaaagagggtatgcaatgtattttattaaaaacgggtatgcaataaaaaattatttggtttctctaaaaagtatgcagcacttattttttgataaggtatgcaacaaaattttactttgccgaaaatatgcaatgtttttgcgaataaattcaacgcacacttattacgtgggcgcgccttaattaaattaatggtaccggtagataagttgatttagccataaaatattgtttccgtgaccccttaattaatagggataacagggtaatactagtggcgcgcctatttctgaattcccgatctagtaacatagatgacaccgcgcgcgataatttatcctagtttgcgcgctatattttgttttctatcgcgtattaaatgtataattgcgggactctaatcataaaaacccatctcataaataacgtcatgcattacatgttaattattacatgcttaacgtaattcaacagaaattatatgataatcatcgcaagaccggcaacaggattcaatcttaagaaactttattgccaaatgtttgaacgatcggggatcatccgggtctgtggcgggaactccacgaaaatatccgaacgcagcaagatatcgcggtgcatctcggtcttgcctgggcagtcgccgccgacgccgttgatgtggacgccgggcccgatcatattgtcgctcaggatcgtggcgttgtgcttgtcggccgttgctgtcgtaatgatatcggcaccttcgaccgcctgttccgcagagatcccgtgggcgaagaactccagcatgagatccccgcgctggaggatcatccagccggcgtcccggaaaacgattccgaagcccaacctttcatagaaggcggcggtggaatcgaaatctcgtgatggcaggttgggcgtcgcttggtcggtcatttcgaaccccagagtcccgctcagaagaactcgtcaagaaggcgatagaaggcgatgcgctgcgaatcgggagcggcgataccgtaaagcacgaggaagcggtcagcccattcgccgccaagctcttcagcaatatcacgggtagccaacgctatgtcctgatagcggtccgccacacccagccggccacagtcgatgaatccagaaaagcggccattttccaccatgatattcggcaagcaggcatcgccatgggtcacgacgagatcatcgccgtcgggcatgcgcgccttgagcctggcgaacagttcggctggcgcgagcccctgatgctcttcgtccagatcatcctgatcgacaagaccggcttccatccgagtacgtgctcgctcgatgcgatgtttcgcttggtggtcgaatgggcaggtagccggatcaagcgtatgcagccgccgcattgcatcagccatgatggatactttctcggcaggagcaaggtgagatgacaggagatcctgccccggcacttcgcccaatagcagccagtcccttcccgcttcagtgacaacgtcgagcacagctgcgcaaggaacgcccgtcgtggccagccacgatagccgcgctgcctcgtcctgcagttcattcagggcaccggacaggtcggtcttgacaaaaagaaccgggcgcccctgcgctgacagccggaacacggcggcatcagagcagccgattgtctgttgtgcccagtcatagccgaatagcctctccacccaagcggccggagaacctgcgtgcaatccatcttgttcaatcatgcgaaacgatccagatccggtgcagattatttggattgagagtgaatatgagactctaattggataccgaggggaatttatggaacgtcagtggagcatttttgacaagaaatatttgctagctgatagtgaccttaggcgacttttgaacgcgcaataatggtttctgacgtatgtgcttagctcattaaactccagaaacccgcggctgagtggctccttcaacgttgcggttctgtcagttccaaacgtaaaacggcttgtcccgcgtcatcggcgggggtcataacgtgactcccttaattctccgctcatgatgaattcagaaataaattcagcctaattcggcgttaattcagtacattaaaaacgtccgcaatgtgttattaagttgtctaagcgtcaatttgtttacaccacaatatatcctgccaccagccagccaacagctccccgaccggcagctcggcacaaaatcaccactcgatacaggcagcccatcagtccgggacggcgtcagcgggagagccgttgtaaggcggcagactttgctcatgttaccgatgctattcggaagaacggcaactaagctgccgggtttgaaacacggatgatctcgcggagggtagcatgttgattgtaacgatgacagagcgttgctgcctgtgatcaattcgggcacgaacccagtggacataagcctgttcggttcgtaagctgtaatgcaagtagcgtatgcgctcacgcaactggtccagaaccttgaccgaacgcagcggtggtaacggcgcagtggcggttttcatggcttgttatgactgtttttttggggtacagtctatgcctcgggcatccaagcagcaagcgcgttacgccgtgggtcgatgtttgatgttatggagcagcaacgatgttacgcagcagggcagtcgccctaaaacaaagttaaacatcatgggggaagcggtgatcgccgaagtatcgactcaactatcagaggtagttggcgtcatcgagcgccatctcgaaccgacgttgctggccgtacatttgtacggctccgcagtggatggcggcctgaagccacacagtgatattgatttgctggttacggtgaccgtaaggcttgatgaaacaacgcggcgagctttgatcaacgaccttttggaaacttcggcttcccctggagagagcgagattctccgcgctgtagaagtcaccattgttgtgcacgacgacatcattccgtggcgttatccagctaagcgcgaactgcaatttggagaatggcagcgcaatgacattcttgcaggtatcttcgagccagccacgatcgacattgatctggctatcttgctgacaaaagcaagagaacatagcgttgccttggtaggtccagcggcggaggaactctttgatccggttcctgaacaggatctatttgaggcgctaaatgaaaccttaacgctatggaactcgccgcccgactgggctggcgatgagcgaaatgtagtgcttacgttgtcccgcatttggtacagcgcagtaaccggcaaaatcgcgccgaaggatgtcgctgccgactgggcaatggagcgcctgccggcccagtatcagcccgtcatacttgaagctagacaggcttatcttggacaagaagaagatcgcttggcctcgcgcgcagatcagttggaagaatttgtccactacgtgaaaggcgagatcaccaaggtagtcggcaaataatgtctagctagaaattcgttcaagccgacgccgcttcgcggcgcggcttaactcaagcgttagatgcactaagcacataattgctcacagccaaactatcaggtcaagtctgcttttattatttttaagcgtgcataataagccctacacaaattgggagatatatcatgcatgaccaaaatcccttaacgtgagttttcgttccactgagcgtcagaccccgtagaaaagatcaaaggatcttcttgagatcctttttttctgcgcgtaatctgctgcttgcaaacaaaaaaaccaccgctaccagcggtggtttgtttgccggatcaagagctaccaactctttttccgaaggtaactggcttcagcagagcgcagataccaaatactgtccttctagtgtagccgtagttaggccaccacttcaagaactctgtagcaccgcctacatacctcgctctgctaatcctgttaccagtggctgctgccagtggcgataagtcgtgtcttaccgggttggactcaagacgatagttaccggataaggcgcagcggtcgggctgaacggggggttcgtgcacacagcccagcttggagcgaacgacctacaccgaactgagatacctacagcgtgagctatgagaaagcgccacgcttcccgaagggagaaaggcggacaggtatccggtaagcggcagggtcggaacaggagagcgcacgagggagcttccagggggaaacgcctggtatctttatagtcctgtcgggtttcgccacctctgacttgagcgtcgatttttgtgatgctcgtcaggggggcggagcctatggaaaaacgccagcaacgcggcctttttacggttcctggccttttgctggccttttgctcacatgttctttcctgcgttatcccctgattctgtggataaccgtattaccgcctttgagtgagctgataccgctcgccgcagccgaacgaccgagcgcagcgagtcagtgagcgaggaagcggaagagcgcctgatgcggtattttctccttacgcatctgtgcggtatttcacaccgcatatggtgcactctcagtacaatctgctctgatgccgcatagttaagccagtatacactccgctatcgctacgtgactgggtcatggctgcgccccgacacccgccaacacccgctgacgcgccctgacgggcttgtctgctcccggcatccgcttacagacaagctgtgaccgtctccgggagctgcatgtgtcagaggttttcaccgtcatcaccgaaacgcgcgaggcagggtgccttgatgtgggcgccggcggtcgagtggcgacggcgcggcttgtccgcgccctggtagattgcctggccgtaggccagccatttttgagcggccagcggccgcgataggccgacgcgaagcggcggggcgtagggagcgcagcgaccgaagggtaggcgctttttgcagctcttcggctgtgcgctggccagacagttatgcacaggccaggcgggttttaagagttttaataagttttaaagagttttaggcggaaaaatcgccttttttctcttttatatcagtcacttacatgtgtgaccggttcccaatgtacggctttgggttcccaatgtacgggttccggttcccaatgtacggctttgggttcccaatgtacgtgctatccacaggaaagagaccttttcgacctttttcccctgctagggcaatttgccctagcatctgctccgtacattaggaaccggcggatgcttcgccctcgatcaggttgcggtagcgcatgactaggatcgggccagcctgccccgcctcctccttcaaatcgtactccggcaggtcatttgacccgatcagcttgcgcacggtgaaacagaacttcttgaactctccggcgctgccactgcgttcgtagatcgtcttgaacaaccatctggcttctgccttgcctgcggcgcggcgtgccaggcggtagagaaaacggccgatgccgggatcgatcaaaaagtaatcggggtgaaccgtcagcacgtccgggttcttgccttctgtgatctcgcggtacatccaatcagctagctcgatctcgatgtactccggccgcccggtttcgctctttacgatcttgtagcggctaatcaaggcttcaccctcggataccgtcaccaggcggccgttcttggccttcttcgtacgctgcatggcaacgtgcgtggtgtttaaccgaatgcaggtttctaccaggtcgtctttctgctttccgccatcggctcgccggcagaacttgagtacgtccgcaacgtgtggacggaacacgcggccgggcttgtctcccttcccttcccggtatcggttcatggattcggttagatgggaaaccgccatcagtaccaggtcgtaatcccacacactggccatgccggccggccctgcggaaacctctacgtgcccgtctggaagctcgtagcggatcacctcgccagctcgtcggtcacgcttcgacagacggaaaacggccacgtccatgatgctgcgactatcgcgggtgcccacgtcatagagcatcggaacgaaaaaatctggttgctcgtcgcccttgggcggcttcctaatcgacggcgcaccggctgccggcggttgccgggattctttgcggattcgatcagcggccgcttgccacgattcaccggggcgtgcttctgcctcgatgcgttgccgctgggcggcctgcgcggccttcaacttctccaccaggtcatcacccagcgccgcgccgatttgtaccgggccggatggtttgcgaccgctcacgccgattcctcgggcttgggggttccagtgccattgcagggccggcagacaacccagccgcttacgcctggccaaccgcccgttcctccacacatggggcattccacggcgtcggtgcctggttgttcttgattttccatgccgcctcctttagccgctaaaattcatctactcatttattcatttgctcatttactctggtagctgcgcgatgtattcagatagcagctcggtaatggtcttgccttggcgtaccgcgtacatcttcagcttggtgtgatcctccgccggcaactgaaagttgacccgcttcatggctggcgtgtctgccaggctggccaacgttgcagccttgctgctgcgtgcgctcggacggccggcacttagcgtgtttgtgcttttgctcattttctctttacctcattaactcaaatgagttttgatttaatttcagcggccagcgcctggacctcgcgggcagcgtcgccctcgggttctgattcaagaacggttgtgccggcggcggcagtgcctgggtagctcacgcgctgcgtgatacgggactcaagaatgggcagctcgtacccggccagcgcctcggcaacctcaccgccgatgcgcgtgcctttgatcgcccgcgacacgacaaaggccgcttgtagccttccatccgtgacctcaatgcgctgcttaaccagctccaccaggtcggcggtggcccatatgtcgtaagggcttggctgcaccggaatcagcacgaagtcggctgccttgatcgcggacacagccaagtccgccgcctggggcgctccgtcgatcactacgaagtcgcgccggccgatggccttcacgtcgcggtcaatcgtcgggcggtcgatgccgacaacggttagcggttgatcttcccgcacggccgcccaatcgcgggcactgccctggggatcggaatcgactaacagaacatcggccccggcgagttgcagggcgcgggctagatgggttgcgatggtcgtcttgcctgacccgcctttctggttaagtacagcgataaccttcatgcgttccccttgcgtatttgtttatttactcatcgcatcatatacgcagcgaccgcatgacgcaagctgttttactcaaatacacatcacctttttagacggcggcgctcggtttcttcagcggccaagctggccggccaggccgccagcttggcatcagacaaaccggccaggatttcatgcagccgcacggttgagacgtgcgcgggcggctcgaacacgtacccggccgcgatcatctccgcctcgatctcttcggtaatgaaaaacggttcgtcctggccgtcctggtgcggtttcatgcttgttcctcttggcgttcattctcggcggccgccagggcgtcggcctcggtcaatgcgtcctcacggaaggcaccgcgccgcctggcctcggtgggcgtcacttcctcgctgcgctcaagtgcgcggtacagggtcgagcgatgcacgccaagcagtgcagccgcctctttcacggtgcggccttcctggtcgatcagctcgcgggcgtgcgcgatctgtgccggggtgagggtagggcgggggccaaacttcacgcctcgggccttggcggcctcgcgcccgctccgggtgcggtcgatgattagggaacgctcgaactcggcaatgccggcgaacacggtcaacaccatgcggccggccggcgtggtggtgtcggcccacggctctgccaggctacgcaggcccgcgccggcctcctggatgcgctcggcaatgtccagtaggtcgcgggtgctgcgggccaggcggtctagcctggtcactgtcacaacgtcgccagggcgtaggtggtcaagcatcctggccagctccgggcggtcgcgcctggtgccggtgatcttctcggaaaacagcttggtgcagccggccgcgtgcagttcggcccgttggttggtcaagtcctggtcgtcggtgctgacgcgggcatagcccagcaggccagcggcggcgctcttgttcatggcgtaatgtctccggttctagtcgcaagtattctactttatgcgactaaaacacgcgacaagaaaacgccaggaaaagggcagggcggcagcctgtcgcgtaacttaggacttgtgcgacatgtcgttttcagaagacggctgcactgaacgtcagaagccgactgcactatagcagcggaggggttggatcaaagtactttgatcccgaggggaaccctgtggttggcatgcacatacaaatggacgaacggataaaccttttcacgcccttttaaatatccgattattctaataaacgctcttttctcttag

SEQ ID NO: 65 - DNA, 13506 bp, Artificial Sequence
  Synthetic DNA vector
gtttacccgccaatatatcctgtcaaacactgatagtttaaactgaaggcgggaaacgacaatctgatccaagctcaagctgctctagcattcgccattcaggctgcgcaactgttgggaagggcgatcggtgcgggcctcttcgctattacgccagctggcgaaagggggatgtgctgcaaggcgattaagttgggtaacgccagggttttcccagtcacgacgttgtaaaacgacggccagtgccaagcttattaccctgttatccctaaccggtagataagttgatttagccataaaatattgtttccgtgacccccctgcaggcacgtaataagtgtgcgttgaatttattcgcaaaaacattgcatattttcggcaaagtaaaattttgttgcataccttatcaaaaaataagtgctgcatactttttagagaaaccaaataattttttattgcatacccgtttttaataaaatacattgcataccctcttttaataaaaaatattgcatactttgacgaaacaaattttcgttgcatacccaataaaagattattatattgcatacccgtttttaataaaatacattgcataccctcttttaataaaaaatattgcatacgttgacgaaacaaattttcgttgcatacccaataaaagattattatattgcataccttttcttgccataccatttagccgatcaattgtgctcggcatctagagttatcaacaagtttgtacaaaaaagcaggcttattaataaattagtaatgaacacctagactcgtatcttctaatctcaatgtttaatgaatggtaaaaataattatttaattttccgtggtcaacaatgcataatctttttatttattttgtcttcttacctttcaaaaatttctcaacttgtcaacagaaaaaataaaaatcccaataacaaaggtgacaaccgaaacagaagcacatgaccacaatgctaaagatggataaaaaaaatagagcaaaaagaaagacaaaaatttcagtagtcaagagtataattaagcacgtataatttgcaaaatttttattttatttttatgaaccgtttggtgtatatatataatccttgctttccagttttgatgatctttttgtgctactttgtatgcggttaaagattgttgtaataggcaaagaaatcttaagtaatgcctcagctgttaaacgttgtgatctcctctgttcaaaatatttcaagttgatcttacttatggtaatgctctactcgtgattgtgagtttgaactagtcactgttaaggttttctttataattgattgtcaagctaatgaataagtttgtgaatgaggttttagaaagatgcatgattggaagttgtgtttagtaaatgcttctcattacaactagaatttactatagaatcatagaacggccataaccaaacttcatgagtccggtgatattattggaatagaattcacataattttcatacttttgttacttagactgtctacataatgccacataatgaaaatttgaattagaaaacttgaatactaaatctacagatatttcaagtgacttctaatgtatgacaataagacattaagaccccttccatatcatgaccatttcaaactcgtgtcaatatgtaacccatttatcgtgggccataaacccaaaataataaatcatgtatataaacgggctattgggccataaactagtgataataagctttggggcgacgatctctggatacgtcacccctcgcgatacaattacaaccgatcaaggtcagcgaatactccgacatccttttcttgcggcccacatcggtctttagtgaatcacatgttttttctattgtcgtttcttgcgcatcaagttctgctgaggtttcttgttattttatttttgaaatttttcaacacctttaacttatctcgattttgtttaccacttaaaaaacgcccaaccaatggcatacactgaaaatgttttctaaacatttaatatttctgtggctaccaaaaagaaatcaagagttattttccatttattctgggtgaaagagaaacagagtgccacctgtcatttcctaatctggcacgtaggtttttctcatacgtattacagtgaataatacagtataccaaaggcggctcgtagcagagtttgttcgattctcttaaccacattaggtttggagtattatttgcttctctcgattgaagaagagtacctaaagaatcacaactttgtatacaaaagttgtaatgaatcataatcacgatcccaaaactccccttctcccaacccatcatgatgatgatcatcaagggcggccaacacctgagcgttccacctcagttatcatgtcccttgccacacccaacacggccttcgtcctcctaggacccctcttgtgtacccttgtaatgttgtgtgtcaagttcgatgggaccgagtcgagccggaacatgctggctatcctggtctggatcttcacgtggtggctcaccgaggctgttccgatgcctatcacctccatgtcgccgttgtttctatttccggtgtttggtatcgcctcggccgacgctgttgctaagtcgtacatggacgatgtcatctctcttgtgcttggtagcttcattcttgctcttgctgttgagcactacaatattcacaagaggctggccttgaatataacattgttattctgtggggacccagtgaacccaccgttgctcctcctggggatctgcgccaccacagctttcgtcagcatgtggatgcacaacgtggcagccaccgtcatgatgatgccagtggccaccggaatcctccagagatttccatccacaagagaaggcggccgaaacgacgccgttgacaagttcagtagggcagttgtgcttggggtgatatactctgccacaattggtggtatcagcactctgactgggacaggtgtcaacctcatattggctggcatgtggaagagctatttccctcaagcggaccccatcagcttcaacacgtggctcttttatgggttcccattggctgtctttatcttcttctcgttgtgggccatactttgttgtttgtattgcaaacgtgggtcgggccgggtccttcaggagtatttggataaggatcaccttcaaagagagctcgacttgttaggtccaatgtcctttgcagaaaaaatggtattatccgtctttttggggcttattatgctatggatgacaaggaatctaaccgatggtatccctggatggggagctctatttaaagggagggccggtgatggcactgctagtgttatgatggcaactttgttattcataatacccaacaagaggagaaagggagaaaagctaatggactggactaagtgcaagaaactaccttggaacgttgttcttctacttggggccggctttgccatcgcagatggggtgcggtcaagcggcctagcggacgtgctttcccgcgccttggacttcctagagacggctccattttgggcaattgcacccatggtgtgtctcataggtgggatcatgaccgagttcacctccaacaatgccaccacgacattgttggttcctctgttgatccaaattgcacagacgatgcacgtgcatccgcttcttcttatggtccctggagccgttggggcccaattcgccttcttgcttccgactggaactccttccaatatagttgggttcaccactggtcatattgacatcaaggatatgattaaaactggtctccctctaaagattgctgggacagttgtactctcatttttaatgcctacccttggagcctacgtttttgggacaaacaacaaaccgctgatgtacccacaaagttggcgtagtttgtattcaaattcgggatatacaaacccaacttttctatacaaagttgtaatggactacaaagaccatgacggtgattataaagatcatgacatcgattacaaggatgacgatgacaagtgaacaactttgtataataaagttgtatccatatcccctccacttcgccacgtgcttcttcttctctatgtctctatcttgttcactttatgacctctaatcagttgaaatcatatgttgtttacttggaacaattcaatgaaattcagcattttagaaagacagggtattgactttgaaattgaatcatctggtttgactgatagtcaatttaaatggtattaacttttgactaagcacagttagttttcaacatttttaaaattgaacaattaaattgaaaaaacctataagctatggttaaagattgattagtaaaaaatgtttgcttttgcataagagtagaaaaagttttatgggtttaatattttttgtatcaaacatttgaaatatttcttgtatatctgtaaaattattttaaaatatctattataagatttatatgagttttccacttccacatgattcatgtgatacagaaagtgcatctcaaaacttctagagtttccctaccaaaaaaaaaaaaccacccagctttcttgtacaaagtggttgataacagcgcttagagctctgccgagcacaattgatcggctaaatggtatggcaagaaaaggtatgcaatataataatcttttattgggtatgcaacgaaaatttgtttcgtcaacgtatgcaatattttttattaaaagagggtatgcaatgtattttattaaaaacgggtatgcaatataataatcttttattgggtatgcaacgaaaatttgtttcgtcaaagtatgcaatattttttattaaaagagggtatgcaatgtattttattaaaaacgggtatgcaataaaaaattatttggtttctctaaaaagtatgcagcacttattttttgataaggtatgcaacaaaattttactttgccgaaaatatgcaatgtttttgcgaataaattcaacgcacacttattacgtgggcgcgccttaattaaattaatggtaccggttctgagtcacggcttcattggcattccgtacaacgaacgtccttaattaatagggataacagggtaatactagtggcgcgcctatttctgaattcccgatctagtaacatagatgacaccgcgcgcgataatttatcctagtttgcgcgctatattttgttttctatcgcgtattaaatgtataattgcgggactctaatcataaaaacccatctcataaataacgtcatgcattacatgttaattattacatgcttaacgtaattcaacagaaattatatgataatcatcgcaagaccggcaacaggattcaatcttaagaaactttattgccaaatgtttgaacgatcggggatcatccgggtctgtggcgggaactccacgaaaatatccgaacgcagcaagatatcgcggtgcatctcggtcttgcctgggcagtcgccgccgacgccgttgatgtggacgccgggcccgatcatattgtcgctcaggatcgtggcgttgtgcttgtcggccgttgctgtcgtaatgatatcggcaccttcgaccgcctgttccgcagagatcccgtgggcgaagaactccagcatgagatccccgcgctggaggatcatccagccggcgtcccggaaaacgattccgaagcccaacctttcatagaaggcggcggtggaatcgaaatctcgtgatggcaggttgggcgtcgcttggtcggtcatttcgaaccccagagtcccgctcagaagaactcgtcaagaaggcgatagaaggcgatgcgctgcgaatcgggagcggcgataccgtaaagcacgaggaagcggtcagcccattcgccgccaagctcttcagcaatatcacgggtagccaacgctatgtcctgatagcggtccgccacacccagccggccacagtcgatgaatccagaaaagcggccattttccaccatgatattcggcaagcaggcatcgccatgggtcacgacgagatcatcgccgtcgggcatgcgcgccttgagcctggcgaacagttcggctggcgcgagcccctgatgctcttcgtccagatcatcctgatcgacaagaccggcttccatccgagtacgtgctcgctcgatgcgatgtttcgcttggtggtcgaatgggcaggtagccggatcaagcgtatgcagccgccgcattgcatcagccatgatggatactttctcggcaggagcaaggtgagatgacaggagatcctgccccggcacttcgcccaatagcagccagtcccttcccgcttcagtgacaacgtcgagcacagctgcgcaaggaacgcccgtcgtggccagccacgatagccgcgctgcctcgtcctgcagttcattcagggcaccggacaggtcggtcttgacaaaaagaaccgggcgcccctgcgctgacagccggaacacggcggcatcagagcagccgattgtctgttgtgcccagtcatagccgaatagcctctccacccaagcggccggagaacctgcgtgcaatccatcttgttcaatcatgcgaaacgatccagatccggtgcagattatttggattgagagtgaatatgagactctaattggataccgaggggaatttatggaacgtcagtggagcatttttgacaagaaatatttgctagctgatagtgaccttaggcgacttttgaacgcgcaataatggtttctgacgtatgtgcttagctcattaaactccagaaacccgcggctgagtggctccttcaacgttgcggttctgtcagttccaaacgtaaaacggcttgtcccgcgtcatcggcgggggtcataacgtgactcccttaattctccgctcatgatgaattcagaaataaattcagcctaattcggcgttaattcagtacattaaaaacgtccgcaatgtgttattaagttgtctaagcgtcaatttgtttacaccacaatatatcctgccaccagccagccaacagctccccgaccggcagctcggcacaaaatcaccactcgatacaggcagcccatcagtccgggacggcgtcagcgggagagccgttgtaaggcggcagactttgctcatgttaccgatgctattcggaagaacggcaactaagctgccgggtttgaaacacggatgatctcgcggagggtagcatgttgattgtaacgatgacagagcgttgctgcctgtgatcaattcgggcacgaacccagtggacataagcctgttcggttcgtaagctgtaatgcaagtagcgtatgcgctcacgcaactggtccagaaccttgaccgaacgcagcggtggtaacggcgcagtggcggttttcatggcttgttatgactgtttttttggggtacagtctatgcctcgggcatccaagcagcaagcgcgttacgccgtgggtcgatgtttgatgttatggagcagcaacgatgttacgcagcagggcagtcgccctaaaacaaagttaaacatcatgggggaagcggtgatcgccgaagtatcgactcaactatcagaggtagttggcgtcatcgagcgccatctcgaaccgacgttgctggccgtacatttgtacggctccgcagtggatggcggcctgaagccacacagtgatattgatttgctggttacggtgaccgtaaggcttgatgaaacaacgcggcgagctttgatcaacgaccttttggaaacttcggcttcccctggagagagcgagattctccgcgctgtagaagtcaccattgttgtgcacgacgacatcattccgtggcgttatccagctaagcgcgaactgcaatttggagaatggcagcgcaatgacattcttgcaggtatcttcgagccagccacgatcgacattgatctggctatcttgctgacaaaagcaagagaacatagcgttgccttggtaggtccagcggcggaggaactctttgatccggttcctgaacaggatctatttgaggcgctaaatgaaaccttaacgctatggaactcgccgcccgactgggctggcgatgagcgaaatgtagtgcttacgttgtcccgcatttggtacagcgcagtaaccggcaaaatcgcgccgaaggatgtcgctgccgactgggcaatggagcgcctgccggcccagtatcagcccgtcatacttgaagctagacaggcttatcttggacaagaagaagatcgcttggcctcgcgcgcagatcagttggaagaatttgtccactacgtgaaaggcgagatcaccaaggtagtcggcaaataatgtctagctagaaattcgttcaagccgacgccgcttcgcggcgcggcttaactcaagcgttagatgcactaagcacataattgctcacagccaaactatcaggtcaagtctgcttttattatttttaagcgtgcataataagccctacacaaattgggagatatatcatgcatgaccaaaatcccttaacgtgagttttcgttccactgagcgtcagaccccgtagaaaagatcaaaggatcttcttgagatcctttttttctgcgcgtaatctgctgcttgcaaacaaaaaaaccaccgctaccagcggtggtttgtttgccggatcaagagctaccaactctttttccgaaggtaactggcttcagcagagcgcagataccaaatactgtccttctagtgtagccgtagttaggccaccacttcaagaactctgtagcaccgcctacatacctcgctctgctaatcctgttaccagtggctgctgccagtggcgataagtcgtgtcttaccgggttggactcaagacgatagttaccggataaggcgcagcggtcgggctgaacggggggttcgtgcacacagcccagcttggagcgaacgacctacaccgaactgagatacctacagcgtgagctatgagaaagcgccacgcttcccgaagggagaaaggcggacaggtatccggtaagcggcagggtcggaacaggagagcgcacgagggagcttccagggggaaacgcctggtatctttatagtcctgtcgggtttcgccacctctgacttgagcgtcgatttttgtgatgctcgtcaggggggcggagcctatggaaaaacgccagcaacgcggcctttttacggttcctggccttttgctggccttttgctcacatgttctttcctgcgttatcccctgattctgtggataaccgtattaccgcctttgagtgagctgataccgctcgccgcagccgaacgaccgagcgcagcgagtcagtgagcgaggaagcggaagagcgcctgatgcggtattttctccttacgcatctgtgcggtatttcacaccgcatatggtgcactctcagtacaatctgctctgatgccgcatagttaagccagtatacactccgctatcgctacgtgactgggtcatggctgcgccccgacacccgccaacacccgctgacgcgccctgacgggcttgtctgctcccggcatccgcttacagacaagctgtgaccgtctccgggagctgcatgtgtcagaggttttcaccgtcatcaccgaaacgcgcgaggcagggtgccttgatgtgggcgccggcggtcgagtggcgacggcgcggcttgtccgcgccctggtagattgcctggccgtaggccagccatttttgagcggccagcggccgcgataggccgacgcgaagcggcggggcgtagggagcgcagcgaccgaagggtaggcgctttttgcagctcttcggctgtgcgctggccagacagttatgcacaggccaggcgggttttaagagttttaataagttttaaagagttttaggcggaaaaatcgccttttttctcttttatatcagtcacttacatgtgtgaccggttcccaatgtacggctttgggttcccaatgtacgggttccggttcccaatgtacggctttgggttcccaatgtacgtgctatccacaggaaagagaccttttcgacctttttcccctgctagggcaatttgccctagcatctgctccgtacattaggaaccggcggatgcttcgccctcgatcaggttgcggtagcgcatgactaggatcgggccagcctgccccgcctcctccttcaaatcgtactccggcaggtcatttgacccgatcagcttgcgcacggtgaaacagaacttcttgaactctccggcgctgccactgcgttcgtagatcgtcttgaacaaccatctggcttctgccttgcctgcggcgcggcgtgccaggcggtagagaaaacggccgatgccgggatcgatcaaaaagtaatcggggtgaaccgtcagcacgtccgggttcttgccttctgtgatctcgcggtacatccaatcagctagctcgatctcgatgtactccggccgcccggtttcgctctttacgatcttgtagcggctaatcaaggcttcaccctcggataccgtcaccaggcggccgttcttggccttcttcgtacgctgcatggcaacgtgcgtggtgtttaaccgaatgcaggtttctaccaggtcgtctttctgctttccgccatcggctcgccggcagaacttgagtacgtccgcaacgtgtggacggaacacgcggccgggcttgtctcccttcccttcccggtatcggttcatggattcggttagatgggaaaccgccatcagtaccaggtcgtaatcccacacactggccatgccggccggccctgcggaaacctctacgtgcccgtctggaagctcgtagcggatcacctcgccagctcgtcggtcacgcttcgacagacggaaaacggccacgtccatgatgctgcgactatcgcgggtgcccacgtcatagagcatcggaacgaaaaaatctggttgctcgtcgcccttgggcggcttcctaatcgacggcgcaccggctgccggcggttgccgggattctttgcggattcgatcagcggccgcttgccacgattcaccggggcgtgcttctgcctcgatgcgttgccgctgggcggcctgcgcggccttcaacttctccaccaggtcatcacccagcgccgcgccgatttgtaccgggccggatggtttgcgaccgctcacgccgattcctcgggcttgggggttccagtgccattgcagggccggcagacaacccagccgcttacgcctggccaaccgcccgttcctccacacatggggcattccacggcgtcggtgcctggttgttcttgattttccatgccgcctcctttagccgctaaaattcatctactcatttattcatttgctcatttactctggtagctgcgcgatgtattcagatagcagctcggtaatggtcttgccttggcgtaccgcgtacatcttcagcttggtgtgatcctccgccggcaactgaaagttgacccgcttcatggctggcgtgtctgccaggctggccaacgttgcagccttgctgctgcgtgcgctcggacggccggcacttagcgtgtttgtgcttttgctcattttctctttacctcattaactcaaatgagttttgatttaatttcagcggccagcgcctggacctcgcgggcagcgtcgccctcgggttctgattcaagaacggttgtgccggcggcggcagtgcctgggtagctcacgcgctgcgtgatacgggactcaagaatgggcagctcgtacccggccagcgcctcggcaacctcaccgccgatgcgcgtgcctttgatcgcccgcgacacgacaaaggccgcttgtagccttccatccgtgacctcaatgcgctgcttaaccagctccaccaggtcggcggtggcccatatgtcgtaagggcttggctgcaccggaatcagcacgaagtcggctgccttgatcgcggacacagccaagtccgccgcctggggcgctccgtcgatcactacgaagtcgcgccggccgatggccttcacgtcgcggtcaatcgtcgggcggtcgatgccgacaacggttagcggttgatcttcccgcacggccgcccaatcgcgggcactgccctggggatcggaatcgactaacagaacatcggccccggcgagttgcagggcgcgggctagatgggttgcgatggtcgtcttgcctgacccgcctttctggttaagtacagcgataaccttcatgcgttccccttgcgtatttgtttatttactcatcgcatcatatacgcagcgaccgcatgacgcaagctgttttactcaaatacacatcacctttttagacggcggcgctcggtttcttcagcggccaagctggccggccaggccgccagcttggcatcagacaaaccggccaggatttcatgcagccgcacggttgagacgtgcgcgggcggctcgaacacgtacccggccgcgatcatctccgcctcgatctcttcggtaatgaaaaacggttcgtcctggccgtcctggtgcggtttcatgcttgttcctcttggcgttcattctcggcggccgccagggcgtcggcctcggtcaatgcgtcctcacggaaggcaccgcgccgcctggcctcggtgggcgtcacttcctcgctgcgctcaagtgcgcggtacagggtcgagcgatgcacgccaagcagtgcagccgcctctttcacggtgcggccttcctggtcgatcagctcgcgggcgtgcgcgatctgtgccggggtgagggtagggcgggggccaaacttcacgcctcgggccttggcggcctcgcgcccgctccgggtgcggtcgatgattagggaacgctcgaactcggcaatgccggcgaacacggtcaacaccatgcggccggccggcgtggtggtgtcggcccacggctctgccaggctacgcaggcccgcgccggcctcctggatgcgctcggcaatgtccagtaggtcgcgggtgctgcgggccaggcggtctagcctggtcactgtcacaacgtcgccagggcgtaggtggtcaagcatcctggccagctccgggcggtcgcgcctggtgccggtgatcttctcggaaaacagcttggtgcagccggccgcgtgcagttcggcccgttggttggtcaagtcctggtcgtcggtgctgacgcgggcatagcccagcaggccagcggcggcgctcttgttcatggcgtaatgtctccggttctagtcgcaagtattctactttatgcgactaaaacacgcgacaagaaaacgccaggaaaagggcagggcggcagcctgtcgcgtaacttaggacttgtgcgacatgtcgttttcagaagacggctgcactgaacgtcagaagccgactgcactatagcagcggaggggttggatcaaagtactttgatcccgaggggaaccctgtggttggcatgcacatacaaatggacgaacggataaaccttttcacgcccttttaaatatccgattattctaataaacgctcttttctcttag

SEQ ID NO: 66 - DNA, 13534 bp, Artificial Sequence
  Synthetic DNA vector
gtttacccgccaatatatcctgtcaaacactgatagtttaaactgaaggcgggaaacgacaatctgatccaagctcaagctgctctagcattcgccattcaggctgcgcaactgttgggaagggcgatcggtgcgggcctcttcgctattacgccagctggcgaaagggggatgtgctgcaaggcgattaagttgggtaacgccagggttttcccagtcacgacgttgtaaaacgacggccagtgccaagcttattaccctgttatccctaaccggttctgagtcacggcttcattggcattccgtacaacgaacgtcccctgcaggcacgtaataagtgtgcgttgaatttattcgcaaaaacattgcatattttcggcaaagtaaaattttgttgcataccttatcaaaaaataagtgctgcatactttttagagaaaccaaataattttttattgcatacccgtttttaataaaatacattgcataccctcttttaataaaaaatattgcatactttgacgaaacaaattttcgttgcatacccaataaaagattattatattgcatacccgtttttaataaaatacattgcataccctcttttaataaaaaatattgcatacgttgacgaaacaaattttcgttgcatacccaataaaagattattatattgcataccttttcttgccataccatttagccgatcaattgtgctcggcatctagagttatcaacaagtttgtacaaaaaagcaggcttaagcttatagcgtagagatgattcactgatgttagtttcattcctatggaataacaaaatgcttttgatggtatcttcatgaacatgtacgttcacaactatctttgtagctctataactatttggtaactccggtttaagcaaagttctacactttaataatatcgacttcgttaatatatacaaatgaaaatagtcttatagatgcgagagcaaatgtttgagggtaggttaaaggaatcttgagatatggataaacgacactaagttgtgtcgtagcgagacagatccaaactacgacaagtagtaaacggagataataatatccaaaccataagaatccatgaaagcaagtagacaactgcgactttgcctcaccagtcaccatactaataattggagaggtggatctcttaggaatatttacttttataaaagatcagaggctagtcagaactcagggactaaattttattttcagtagtgacatctttaaaagacaacagagatttataaaactccacgtgtacagaagtgaaacagtctgacatgatgcctgatgctaactaactatgtaagataagacatatcttacatagttagttaccatgtaatagtaagtgataacccaaaaatgcaaaaaaaaacatccaactagaacatgtgatatgtcagtatgtgtatgagatcatgtgcacaataatattatcggtatttgtatgtctagttgtctacactctacagctcttactggaaatagattttgaggaacaagaaatagttgaatgagtcattgctatcttctagattttttttttttctgtcataatatcttctagaattttattacttgggaaagcgatatatgatatattctttttccaaaatttactaattaaaaaaaaaaaaaaaaactaagcactctgtatttattgccatattgaaaatgctctttccaccaatattccttatttgcctcaaatcattactttcggattctactgtcttgaactgtgttcatgtgtgtattccctcatcaatcaccttcaattcatattttcctatttccaaaaataaaaagatacagtatctatgtatttaattatatatcatatcaattatatcataataatcataagatcctttttatcgaaataaaaaaggaaacaaatccaatcatagcaagctttttcttttatttaataaacaaaaataaaaagcttcccgaaatggttaaaatccagaaccactaaagtcaaccaaatttgtcaaattcatccacgtcatcagttccatctataaaacgctcacgccattcgtcaagtcccaaaacaagagtccaccacaactttgtatacaaaagttgtaatgggtggtagcaatgcattgaatgagatgaccaatggatctgatggtattactgggggtgttgctgatgtctatggtgaagagtttgccacccaggatcagcttgtcaccccttggagcttctctgttgcttgtggtcattcattgttgagagatccccagcacaacaaagggcttgcttttacagagaaagagagagatgcccacttcttgcgcggtctgttaccccctgtagttctgtcacaagagctccaggagaagaagttcttgacgactcttcgtcaatatcaagttcccttgcagaaatacatggccatgatggatcttcaggagaggaatgagaaactgttctacaaacttcttgttgaccatgtcgaagaactgcttcctcttgtttatacgccaactgttggtgagggatgccaaaagtatggaagtatttttagacgtccccaggggctattcatcagtttgaaggataagggaagaatccttgagcttttgagaaactggcctgaaaagaaaattcaagttattgtagttactgatggtgaacgcatactggggctaggagaccttggctgtcagggaatgggaatacctgttggaaaactttccttgtattcagcccttggtggagtctgcccatcagcatgcttgcctataacccttgatgttggcaccaacaatcagaagttgttagatgatgaattttacattggattgaagcagaagcgggctactggagaggaatatgctgagtttgtccaagaattcatgtctgcagttaagcaaaactatggggagaagatccttgtacagtttgaagattttgccaaccataacgcatttgagttgctggagaaataccgcaccactcacctcgtcttcaatgatgacattcagggtactgcttctgttgttcttgcaggacttattgcttctttaaaactactagggggaaccttggctgaccataaatttttgttcctcggtgctggagaagctggaacgggtattgcagagcttatagcccttgagatgtcaaagaagacaaaggctccagtagagcagatgaggaaaaagatttggcttgtcgactccaagggacttgttgttagctctaggaaggagacacttcagcagttcaaactaccttgggctcacgaacatgaacccattacaactcttatagatgctgtccaggcaatcaagcccacagtgttgattggtacttctggaaaagggaaacaatttaccaaggaggtcgttgaagccatggcaaatatcaatgcgaaacctctcattcttgctctatcaaatcctacttcacagtcagaatgtactgccgaagaagcctacacatggagtcagggacatgcaatatttgccagtggaagcccatttgaccctgttgaatatgaaggaagaacttttgtccctggccaggcaaataatgcttacattttccctgggtttggtttgggtctgatcatgtgtggtgcaatccgtgtccatgatgacatgctattggctgcctctgaggcactggcttcacaagttacaggagaacatttcataaagggacttatctacccaccattcaaggacatcagaaagatatcagctcacattgctgccggagtagctgcaaaagcttatgaacttggtttggctagtcggcttcctcaaccagccgatcttgttaagtttgccgagagctgcatgtacaaccctacttaccggagtttccgtaacccaacttttctatacaaagttgtaatggaacaaaagcttatttctgaggaagatcttaacggtgaacaaaagcttatttctgaggaagatcttaacggacttgatggagaacaaaagcttatttctgaggaagatcttaacggagaacaaaagcttatttctgaggaagatcttaacggttctgcttagacaactttgtataataaagttgtatttgttatgtaacttattcttctaataaaaaactccgctagttcatatcttgttaagtatttggttagcctaagaaattatatagcttgaggtttcacattttcaatattttttaaaaataatttgggtcaatattgatgttggaaatgaaatcaacggttgaattattgtcgtgtgctgcttgcaccatggtccatgctagatggaccgaccactatttttccaaacagtgcctatcctatcaagtagatattttctgaatacgtagataattgtagaatacaagaaaagaaatatcctctgtggaataaatgaataatatacttttgtcagaaacgttacaagttaaaattccacgactgattgccacgtgtaagcttatctcaaaagggccctacagtaccatgatgacgtcatctcttacaccactctctgaaaaattcctccgccttataaaaaaactcgattatcgtcttcacttagtcacccagctttcttgtacaaagtggttgataacagcgcttagagctctgccgagcacaattgatcggctaaatggtatggcaagaaaaggtatgcaatataataatcttttattgggtatgcaacgaaaatttgtttcgtcaacgtatgcaatattttttattaaaagagggtatgcaatgtattttattaaaaacgggtatgcaatataataatcttttattgggtatgcaacgaaaatttgtttcgtcaaagtatgcaatattttttattaaaagagggtatgcaatgtattttattaaaaacgggtatgcaataaaaaattatttggtttctctaaaaagtatgcagcacttattttttgataaggtatgcaacaaaattttactttgccgaaaatatgcaatgtttttgcgaataaattcaacgcacacttattacgtgggcgcgccttaattaaattaatggtaccggtcctcagagagcctatagcggtaaaacaacaccatgcatccccttaattaatagggataacagggtaatactagtggcgcgcctatttctgaattcccgatctagtaacatagatgacaccgcgcgcgataatttatcctagtttgcgcgctatattttgttttctatcgcgtattaaatgtataattgcgggactctaatcataaaaacccatctcataaataacgtcatgcattacatgttaattattacatgcttaacgtaattcaacagaaattatatgataatcatcgcaagaccggcaacaggattcaatcttaagaaactttattgccaaatgtttgaacgatcggggatcatccgggtctgtggcgggaactccacgaaaatatccgaacgcagcaagatatcgcggtgcatctcggtcttgcctgggcagtcgccgccgacgccgttgatgtggacgccgggcccgatcatattgtcgctcaggatcgtggcgttgtgcttgtcggccgttgctgtcgtaatgatatcggcaccttcgaccgcctgttccgcagagatcccgtgggcgaagaactccagcatgagatccccgcgctggaggatcatccagccggcgtcccggaaaacgattccgaagcccaacctttcatagaaggcggcggtggaatcgaaatctcgtgatggcaggttgggcgtcgcttggtcggtcatttcgaaccccagagtcccgctcagaagaactcgtcaagaaggcgatagaaggcgatgcgctgcgaatcgggagcggcgataccgtaaagcacgaggaagcggtcagcccattcgccgccaagctcttcagcaatatcacgggtagccaacgctatgtcctgatagcggtccgccacacccagccggccacagtcgatgaatccagaaaagcggccattttccaccatgatattcggcaagcaggcatcgccatgggtcacgacgagatcatcgccgtcgggcatgcgcgccttgagcctggcgaacagttcggctggcgcgagcccctgatgctcttcgtccagatcatcctgatcgacaagaccggcttccatccgagtacgtgctcgctcgatgcgatgtttcgcttggtggtcgaatgggcaggtagccggatcaagcgtatgcagccgccgcattgcatcagccatgatggatactttctcggcaggagcaaggtgagatgacaggagatcctgccccggcacttcgcccaatagcagccagtcccttcccgcttcagtgacaacgtcgagcacagctgcgcaaggaacgcccgtcgtggccagccacgatagccgcgctgcctcgtcctgcagttcattcagggcaccggacaggtcggtcttgacaaaaagaaccgggcgcccctgcgctgacagccggaacacggcggcatcagagcagccgattgtctgttgtgcccagtcatagccgaatagcctctccacccaagcggccggagaacctgcgtgcaatccatcttgttcaatcatgcgaaacgatccagatccggtgcagattatttggattgagagtgaatatgagactctaattggataccgaggggaatttatggaacgtcagtggagcatttttgacaagaaatatttgctagctgatagtgaccttaggcgacttttgaacgcgcaataatggtttctgacgtatgtgcttagctcattaaactccagaaacccgcggctgagtggctccttcaacgttgcggttctgtcagttccaaacgtaaaacggcttgtcccgcgtcatcggcgggggtcataacgtgactcccttaattctccgctcatgatgaattcagaaataaattcagcctaattcggcgttaattcagtacattaaaaacgtccgcaatgtgttattaagttgtctaagcgtcaatttgtttacaccacaatatatcctgccaccagccagccaacagctccccgaccggcagctcggcacaaaatcaccactcgatacaggcagcccatcagtccgggacggcgtcagcgggagagccgttgtaaggcggcagactttgctcatgttaccgatgctattcggaagaacggcaactaagctgccgggtttgaaacacggatgatctcgcggagggtagcatgttgattgtaacgatgacagagcgttgctgcctgtgatcaattcgggcacgaacccagtggacataagcctgttcggttcgtaagctgtaatgcaagtagcgtatgcgctcacgcaactggtccagaaccttgaccgaacgcagcggtggtaacggcgcagtggcggttttcatggcttgttatgactgtttttttggggtacagtctatgcctcgggcatccaagcagcaagcgcgttacgccgtgggtcgatgtttgatgttatggagcagcaacgatgttacgcagcagggcagtcgccctaaaacaaagttaaacatcatgggggaagcggtgatcgccgaagtatcgactcaactatcagaggtagttggcgtcatcgagcgccatctcgaaccgacgttgctggccgtacatttgtacggctccgcagtggatggcggcctgaagccacacagtgatattgatttgctggttacggtgaccgtaaggcttgatgaaacaacgcggcgagctttgatcaacgaccttttggaaacttcggcttcccctggagagagcgagattctccgcgctgtagaagtcaccattgttgtgcacgacgacatcattccgtggcgttatccagctaagcgcgaactgcaatttggagaatggcagcgcaatgacattcttgcaggtatcttcgagccagccacgatcgacattgatctggctatcttgctgacaaaagcaagagaacatagcgttgccttggtaggtccagcggcggaggaactctttgatccggttcctgaacaggatctatttgaggcgctaaatgaaaccttaacgctatggaactcgccgcccgactgggctggcgatgagcgaaatgtagtgcttacgttgtcccgcatttggtacagcgcagtaaccggcaaaatcgcgccgaaggatgtcgctgccgactgggcaatggagcgcctgccggcccagtatcagcccgtcatacttgaagctagacaggcttatcttggacaagaagaagatcgcttggcctcgcgcgcagatcagttggaagaatttgtccactacgtgaaaggcgagatcaccaaggtagtcggcaaataatgtctagctagaaattcgttcaagccgacgccgcttcgcggcgcggcttaactcaagcgttagatgcactaagcacataattgctcacagccaaactatcaggtcaagtctgcttttattatttttaagcgtgcataataagccctacacaaattgggagatatatcatgcatgaccaaaatcccttaacgtgagttttcgttccactgagcgtcagaccccgtagaaaagatcaaaggatcttcttgagatcctttttttctgcgcgtaatctgctgcttgcaaacaaaaaaaccaccgctaccagcggtggtttgtttgccggatcaagagctaccaactctttttccgaaggtaactggcttcagcagagcgcagataccaaatactgtccttctagtgtagccgtagttaggccaccacttcaagaactctgtagcaccgcctacatacctcgctctgctaatcctgttaccagtggctgctgccagtggcgataagtcgtgtcttaccgggttggactcaagacgatagttaccggataaggcgcagcggtcgggctgaacggggggttcgtgcacacagcccagcttggagcgaacgacctacaccgaactgagatacctacagcgtgagctatgagaaagcgccacgcttcccgaagggagaaaggcggacaggtatccggtaagcggcagggtcggaacaggagagcgcacgagggagcttccagggggaaacgcctggtatctttatagtcctgtcgggtttcgccacctctgacttgagcgtcgatttttgtgatgctcgtcaggggggcggagcctatggaaaaacgccagcaacgcggcctttttacggttcctggccttttgctggccttttgctcacatgttctttcctgcgttatcccctgattctgtggataaccgtattaccgcctttgagtgagctgataccgctcgccgcagccgaacgaccgagcgcagcgagtcagtgagcgaggaagcggaagagcgcctgatgcggtattttctccttacgcatctgtgcggtatttcacaccgcatatggtgcactctcagtacaatctgctctgatgccgcatagttaagccagtatacactccgctatcgctacgtgactgggtcatggctgcgccccgacacccgccaacacccgctgacgcgccctgacgggcttgtctgctcccggcatccgcttacagacaagctgtgaccgtctccgggagctgcatgtgtcagaggttttcaccgtcatcaccgaaacgcgcgaggcagggtgccttgatgtgggcgccggcggtcgagtggcgacggcgcggcttgtccgcgccctggtagattgcctggccgtaggccagccatttttgagcggccagcggccgcgataggccgacgcgaagcggcggggcgtagggagcgcagcgaccgaagggtaggcgctttttgcagctcttcggctgtgcgctggccagacagttatgcacaggccaggcgggttttaagagttttaataagttttaaagagttttaggcggaaaaatcgccttttttctcttttatatcagtcacttacatgtgtgaccggttcccaatgtacggctttgggttcccaatgtacgggttccggttcccaatgtacggctttgggttcccaatgtacgtgctatccacaggaaagagaccttttcgacctttttcccctgctagggcaatttgccctagcatctgctccgtacattaggaaccggcggatgcttcgccctcgatcaggttgcggtagcgcatgactaggatcgggccagcctgccccgcctcctccttcaaatcgtactccggcaggtcatttgacccgatcagcttgcgcacggtgaaacagaacttcttgaactctccggcgctgccactgcgttcgtagatcgtcttgaacaaccatctggcttctgccttgcctgcggcgcggcgtgccaggcggtagagaaaacggccgatgccgggatcgatcaaaaagtaatcggggtgaaccgtcagcacgtccgggttcttgccttctgtgatctcgcggtacatccaatcagctagctcgatctcgatgtactccggccgcccggtttcgctctttacgatcttgtagcggctaatcaaggcttcaccctcggataccgtcaccaggcggccgttcttggccttcttcgtacgctgcatggcaacgtgcgtggtgtttaaccgaatgcaggtttctaccaggtcgtctttctgctttccgccatcggctcgccggcagaacttgagtacgtccgcaacgtgtggacggaacacgcggccgggcttgtctcccttcccttcccggtatcggttcatggattcggttagatgggaaaccgccatcagtaccaggtcgtaatcccacacactggccatgccggccggccctgcggaaacctctacgtgcccgtctggaagctcgtagcggatcacctcgccagctcgtcggtcacgcttcgacagacggaaaacggccacgtccatgatgctgcgactatcgcgggtgcccacgtcatagagcatcggaacgaaaaaatctggttgctcgtcgcccttgggcggcttcctaatcgacggcgcaccggctgccggcggttgccgggattctttgcggattcgatcagcggccgcttgccacgattcaccggggcgtgcttctgcctcgatgcgttgccgctgggcggcctgcgcggccttcaacttctccaccaggtcatcacccagcgccgcgccgatttgtaccgggccggatggtttgcgaccgctcacgccgattcctcgggcttgggggttccagtgccattgcagggccggcagacaacccagccgcttacgcctggccaaccgcccgttcctccacacatggggcattccacggcgtcggtgcctggttgttcttgattttccatgccgcctcctttagccgctaaaattcatctactcatttattcatttgctcatttactctggtagctgcgcgatgtattcagatagcagctcggtaatggtcttgccttggcgtaccgcgtacatcttcagcttggtgtgatcctccgccggcaactgaaagttgacccgcttcatggctggcgtgtctgccaggctggccaacgttgcagccttgctgctgcgtgcgctcggacggccggcacttagcgtgtttgtgcttttgctcattttctctttacctcattaactcaaatgagttttgatttaatttcagcggccagcgcctggacctcgcgggcagcgtcgccctcgggttctgattcaagaacggttgtgccggcggcggcagtgcctgggtagctcacgcgctgcgtgatacgggactcaagaatgggcagctcgtacccggccagcgcctcggcaacctcaccgccgatgcgcgtgcctttgatcgcccgcgacacgacaaaggccgcttgtagccttccatccgtgacctcaatgcgctgcttaaccagctccaccaggtcggcggtggcccatatgtcgtaagggcttggctgcaccggaatcagcacgaagtcggctgccttgatcgcggacacagccaagtccgccgcctggggcgctccgtcgatcactacgaagtcgcgccggccgatggccttcacgtcgcggtcaatcgtcgggcggtcgatgccgacaacggttagcggttgatcttcccgcacggccgcccaatcgcgggcactgccctggggatcggaatcgactaacagaacatcggccccggcgagttgcagggcgcgggctagatgggttgcgatggtcgtcttgcctgacccgcctttctggttaagtacagcgataaccttcatgcgttccccttgcgtatttgtttatttactcatcgcatcatatacgcagcgaccgcatgacgcaagctgttttactcaaatacacatcacctttttagacggcggcgctcggtttcttcagcggccaagctggccggccaggccgccagcttggcatcagacaaaccggccaggatttcatgcagccgcacggttgagacgtgcgcgggcggctcgaacacgtacccggccgcgatcatctccgcctcgatctcttcggtaatgaaaaacggttcgtcctggccgtcctggtgcggtttcatgcttgttcctcttggcgttcattctcggcggccgccagggcgtcggcctcggtcaatgcgtcctcacggaaggcaccgcgccgcctggcctcggtgggcgtcacttcctcgctgcgctcaagtgcgcggtacagggtcgagcgatgcacgccaagcagtgcagccgcctctttcacggtgcggccttcctggtcgatcagctcgcgggcgtgcgcgatctgtgccggggtgagggtagggcgggggccaaacttcacgcctcgggccttggcggcctcgcgcccgctccgggtgcggtcgatgattagggaacgctcgaactcggcaatgccggcgaacacggtcaacaccatgcggccggccggcgtggtggtgtcggcccacggctctgccaggctacgcaggcccgcgccggcctcctggatgcgctcggcaatgtccagtaggtcgcgggtgctgcgggccaggcggtctagcctggtcactgtcacaacgtcgccagggcgtaggtggtcaagcatcctggccagctccgggcggtcgcgcctggtgccggtgatcttctcggaaaacagcttggtgcagccggccgcgtgcagttcggcccgttggttggtcaagtcctggtcgtcggtgctgacgcgggcatagcccagcaggccagcggcggcgctcttgttcatggcgtaatgtctccggttctagtcgcaagtattctactttatgcgactaaaacacgcgacaagaaaacgccaggaaaagggcagggcggcagcctgtcgcgtaacttaggacttgtgcgacatgtcgttttcagaagacggctgcactgaacgtcagaagccgactgcactatagcagcggaggggttggatcaaagtactttgatcccgaggggaaccctgtggttggcatgcacatacaaatggacgaacggataaaccttttcacgcccttttaaatatccgattattctaataaacgctcttttctcttag

SEQ ID NO: 67 - DNA, 14288 bp, Artificial Sequence
  Synthetic DNA vector
gtttacccgccaatatatcctgtcaaacactgatagtttaaactgaaggcgggaaacgacaatctgatccaagctcaagctgctctagcattcgccattcaggctgcgcaactgttgggaagggcgatcggtgcgggcctcttcgctattacgccagctggcgaaagggggatgtgctgcaaggcgattaagttgggtaacgccagggttttcccagtcacgacgttgtaaaacgacggccagtgccaagcttattaccctgttatccctaaccggtcctcagagagcctatagcggtaaaacaacaccatgcatcccccctgcaggcacgtaataagtgtgcgttgaatttattcgcaaaaacattgcatattttcggcaaagtaaaattttgttgcataccttatcaaaaaataagtgctgcatactttttagagaaaccaaataattttttattgcatacccgtttttaataaaatacattgcataccctcttttaataaaaaatattgcatactttgacgaaacaaattttcgttgcatacccaataaaagattattatattgcatacccgtttttaataaaatacattgcataccctcttttaataaaaaatattgcatacgttgacgaaacaaattttcgttgcatacccaataaaagattattatattgcataccttttcttgccataccatttagccgatcaattgtgctcggcatctagagttatcaacaagtttgtacaaaaaagcaggcttagaacagataagtgaagtttctctgcgatttttctaatgttgaatccatcaaactaataagtggtccctaaacctacatagtcgatggtaaaatgtcaataatgtttgaaagtttagataataccctgaaaatgacgagtcccttcgtttacttgtaataatgggtgagaactacgacacagttccatagcaactttcatatttcgagaattaaattatattccgcagcaaatgctatgtccttgtaaagctctgtttttagtctatgaccatacttgtaaaacatgttgtttttttttgtgtgaattaacagttcattcaaaataaaaataaataaataaataatcgaaaatgtaactctgtggttattgtagcttgaaaaaacgaataatcaagtgtgttgttcattctcttcgttcgttgcacactggtatagcttgttgctgtcatctactgctgactccagcgataatgaaacgatcagaaccacgaaatttactagaactcagcttatcggaacttggaaggggaccagatgagtattaggctaattcgtcgtgttgtatttttcaactaatgcgtcagtgtcgtttttattttcaactaatgcgtcagtgtcattagtttcggaaataaacgatatttgttttgtttttgtattgggtcctatatcgagcgagattggcatgtgagttgggttggctagggaaaatggtaaaatctccacattttgttttgaaaatgtgaaaaatacatttttccctacagcggggatatgaatcagtactatttataatgcaagatatgtaaatttaaaagacatcataagaaaaacaaaactacagaatttcgcttaagctttcaaagatatcgatttgaatataatggtgcatttgcggggttcagtttccacggaaccggtaaatttaaaagccaaataccttaaaagagttgtgaaacagggttacaaatatacatagtggattcgtatgaaaaagaagggaggaatgagtcctacacgtagtcacatcacatatgaaagagattgcttttgaaaatcgaatcctcttctaatattaaatctttcaagactggaggttttaaacaagaaaatcaaactcgacaactttgtatacaaaagttgtaatggcgtcagctttcaaggggatcttgatcagatctccacctgatgtctgtgcagagacagtagcaaaagtgagccaatgcaatcgagctcaacttgttaagaattcgtccactggttttaaaaatatcttcaaattatcagaggccaggaaatttcacgctccagttgcaagtcatttgaggtcacaagccgtcatggccccagcctcagacccaacatcaactgcaataaagagagtattcacctttggtaaaggaaggagtgaaggcaacaagggtatgaagtccttgttgggaggtaaaggagcaaaccttgcagagatggccagcataggcttatccgtcccacctggattgactatttctacagaagcatgccaagagtaccaggagcatggaaaacagctctctgctggtttgtgggaggagatattggagggattgagagtcatagagaaggatatggggtcttaccttggagacccttctaagcctcttctgctttcagttcgttctggtgctgcgatttccatgccagggatgatggacactgtcctcaatctaggacttaatgacgatgtggttgcaggactggcagcaaaaagtggagaacgctttgcttacgactcatacagacgtttcctggacatgtttggtaatgtagtcatgggtatttctcactcatcatttgaagagaagttagaaaagttgaagcaggcaaaaggtgttaaacttgatacggagctaactgcatctgatctaaaagaggtagtagaacagtacaagaacgtctatcttgaagtaaaaggagaaaagtttcctgctgatccagaaagacagcttcagcttgctattcaagcagtatttgattcatgggatagtccaagggccatcaagtatcggaacattaaccagataacaggactgaaagggactgcagttaatatccagtgtatggtgtttggtaacatgggaaatacttcagggactggtgttcttttcactcgaaacccaagcactggtgaaaagaagctctatggggaattcctgattaatgctcagggagaagatgtagttgccggcattagaacgccagaagacttggacaccatgaggagctgcatgcctgaagcttacaaggagcttgtggagaactgtgaaattctggaacgacattacaaggatatgatggatattgaattcactgttcaagaaaataggctatggatgttgcaatgccgatctggtaaacgaactggtaaaggtgctgtgaagatagctgtagacttggtgaaagaaggaatagtcgacacttacactgctattaagatggtggaaccacagcatcttgatcaacttcttcacccacagtttgaagacccatctgcttataaagacagagtgattgctactggcctgccggcatctcctggagctgctgttgggcagattattttcagtgctgatgaagctgaatcatggcaagcacaaggaaagagtgtcattctggtgaggaatgaaactagcccagaggatgttgggggtatgcatgcagcaattggaatcttaactgctaggggtggcatgacatctcatgcagctgttgtagcccgtgggtggggaaaatgttgtgtttcagggtgctctgaaatccgagtgaatgatacagacaaggttcttttggttggagacaaagtaatatcagaaggtgattggctttcacttaatggatctactggtgaagttatcttagggaaagtaccactttcacctcctgctctcagtggggatctagaaaccttcatgtcttgggcggatgatatacgtgtccttaaggtcatggcaaatgctgacacaccagaggatgctttggcagcaagaaacaatggtgctgaaggaattggactttgcaggacagagcacatgttttttgcttcagatgataggattaagacagtgaggaagatgataatggcagtaacatccgaacagagaaaagtggctctggaccagctattgccttatcaaagatccgacttcgaagggatttttcgggcaatggatggtcttccagtgacaattagattgttggaccctccactacatgagttccttcctgaaggtgatgtagaacaaattgtcagtgaacttaccttggagactggcatggctgaagatgaaatcttttccaggattgaaaagttgtcagaggtcaatcctatgttgggtttcagaggctgcaggttggggatatcatacccagaactaactgaaatgcaagcacgggcaatcttccaagctgctgtttcaatgagcaaccagggtgttaaagtttttcctgagataatggttccccttgtaggaacgcctcaggaattaggacatcaagtgagcttgatacggaatgttgcagaaaaggtattctctgagacgggttcctccttgagttacaaggtgggaacaatgattgagatccctagggcggctctggttgcagatgagattgcaatggaagcagaattcttctcttttgggacgaatgatctcacgcaaatgacctttgggtatagcagagatgatgttggcaagttcctccctgtatacttgtccaagggcatacttcagagtgatccatttgaggttttggaccagaaaggtgtgggccaactcatcaaactagcaacggagaagggccgtagtgcaaggcctagcttaaaggttggcatatgtggggagcatggaggagaaccgtcatctgttgcatttttcgcggaagcaggattggactacgtttcatgttcccctttcagggttccaattgcaaggctggcagcagctcaagtcgttaacccaacttttctatacaaagttgtaatgtcttggaaagatgcttctggatggtcttgaacaactttgtataataaagttgtaaattgggctaatgattaacatgaatatttttcataagtctaaaaatatgttattctctctctttcaaaatacattgaatttggtattagttacttttatttatttaagtttggtgttaactttagtactttaagccagaattttctttgaaaatctaaacgaccttattttgagaattctttaagaaagtaagtcttgaaacaattcgaacaagcttaagcttagtttcagcttcttattcttccttagtaatttctcttgatcccgtggcaagtagatttattcctttattgtacgtattgatgatgcctcgatcacttagatgagtccttgttaaagggaaccaaacttcaaatccgactatcattttcttattttctggacaaaaagtctaaactcatatattacagatgtttaaaattttgaatagttttgtctttaacgaggagctacactagtaatggaagcttcgtcgattgaaaagaggtcagatgtatccacacccagctttcttgtacaaagtggttgataacagcgcttagagctctgccgagcacaattgatcggctaaatggtatggcaagaaaaggtatgcaatataataatcttttattgggtatgcaacgaaaatttgtttcgtcaacgtatgcaatattttttattaaaagagggtatgcaatgtattttattaaaaacgggtatgcaatataataatcttttattgggtatgcaacgaaaatttgtttcgtcaaagtatgcaatattttttattaaaagagggtatgcaatgtattttattaaaaacgggtatgcaataaaaaattatttggtttctctaaaaagtatgcagcacttattttttgataaggtatgcaacaaaattttactttgccgaaaatatgcaatgtttttgcgaataaattcaacgcacacttattacgtgggcgcgccttaattaaattaatggtaccggtcgcagtcgcttcctgtaaatagagcattaaattccatagtccttaattaatagggataacagggtaatactagtggcgcgcctatttctgaattcccgatctagtaacatagatgacaccgcgcgcgataatttatcctagtttgcgcgctatattttgttttctatcgcgtattaaatgtataattgcgggactctaatcataaaaacccatctcataaataacgtcatgcattacatgttaattattacatgcttaacgtaattcaacagaaattatatgataatcatcgcaagaccggcaacaggattcaatcttaagaaactttattgccaaatgtttgaacgatcggggatcatccgggtctgtggcgggaactccacgaaaatatccgaacgcagcaagatatcgcggtgcatctcggtcttgcctgggcagtcgccgccgacgccgttgatgtggacgccgggcccgatcatattgtcgctcaggatcgtggcgttgtgcttgtcggccgttgctgtcgtaatgatatcggcaccttcgaccgcctgttccgcagagatcccgtgggcgaagaactccagcatgagatccccgcgctggaggatcatccagccggcgtcccggaaaacgattccgaagcccaacctttcatagaaggcggcggtggaatcgaaatctcgtgatggcaggttgggcgtcgcttggtcggtcatttcgaaccccagagtcccgctcagaagaactcgtcaagaaggcgatagaaggcgatgcgctgcgaatcgggagcggcgataccgtaaagcacgaggaagcggtcagcccattcgccgccaagctcttcagcaatatcacgggtagccaacgctatgtcctgatagcggtccgccacacccagccggccacagtcgatgaatccagaaaagcggccattttccaccatgatattcggcaagcaggcatcgccatgggtcacgacgagatcatcgccgtcgggcatgcgcgccttgagcctggcgaacagttcggctggcgcgagcccctgatgctcttcgtccagatcatcctgatcgacaagaccggcttccatccgagtacgtgctcgctcgatgcgatgtttcgcttggtggtcgaatgggcaggtagccggatcaagcgtatgcagccgccgcattgcatcagccatgatggatactttctcggcaggagcaaggtgagatgacaggagatcctgccccggcacttcgcccaatagcagccagtcccttcccgcttcagtgacaacgtcgagcacagctgcgcaaggaacgcccgtcgtggccagccacgatagccgcgctgcctcgtcctgcagttcattcagggcaccggacaggtcggtcttgacaaaaagaaccgggcgcccctgcgctgacagccggaacacggcggcatcagagcagccgattgtctgttgtgcccagtcatagccgaatagcctctccacccaagcggccggagaacctgcgtgcaatccatcttgttcaatcatgcgaaacgatccagatccggtgcagattatttggattgagagtgaatatgagactctaattggataccgaggggaatttatggaacgtcagtggagcatttttgacaagaaatatttgctagctgatagtgaccttaggcgacttttgaacgcgcaataatggtttctgacgtatgtgcttagctcattaaactccagaaacccgcggctgagtggctccttcaacgttgcggttctgtcagttccaaacgtaaaacggcttgtcccgcgtcatcggcgggggtcataacgtgactcccttaattctccgctcatgatgaattcagaaataaattcagcctaattcggcgttaattcagtacattaaaaacgtccgcaatgtgttattaagttgtctaagcgtcaatttgtttacaccacaatatatcctgccaccagccagccaacagctccccgaccggcagctcggcacaaaatcaccactcgatacaggcagcccatcagtccgggacggcgtcagcgggagagccgttgtaaggcggcagactttgctcatgttaccgatgctattcggaagaacggcaactaagctgccgggtttgaaacacggatgatctcgcggagggtagcatgttgattgtaacgatgacagagcgttgctgcctgtgatcaattcgggcacgaacccagtggacataagcctgttcggttcgtaagctgtaatgcaagtagcgtatgcgctcacgcaactggtccagaaccttgaccgaacgcagcggtggtaacggcgcagtggcggttttcatggcttgttatgactgtttttttggggtacagtctatgcctcgggcatccaagcagcaagcgcgttacgccgtgggtcgatgtttgatgttatggagcagcaacgatgttacgcagcagggcagtcgccctaaaacaaagttaaacatcatgggggaagcggtgatcgccgaagtatcgactcaactatcagaggtagttggcgtcatcgagcgccatctcgaaccgacgttgctggccgtacatttgtacggctccgcagtggatggcggcctgaagccacacagtgatattgatttgctggttacggtgaccgtaaggcttgatgaaacaacgcggcgagctttgatcaacgaccttttggaaacttcggcttcccctggagagagcgagattctccgcgctgtagaagtcaccattgttgtgcacgacgacatcattccgtggcgttatccagctaagcgcgaactgcaatttggagaatggcagcgcaatgacattcttgcaggtatcttcgagccagccacgatcgacattgatctggctatcttgctgacaaaagcaagagaacatagcgttgccttggtaggtccagcggcggaggaactctttgatccggttcctgaacaggatctatttgaggcgctaaatgaaaccttaacgctatggaactcgccgcccgactgggctggcgatgagcgaaatgtagtgcttacgttgtcccgcatttggtacagcgcagtaaccggcaaaatcgcgccgaaggatgtcgctgccgactgggcaatggagcgcctgccggcccagtatcagcccgtcatacttgaagctagacaggcttatcttggacaagaagaagatcgcttggcctcgcgcgcagatcagttggaagaatttgtccactacgtgaaaggcgagatcaccaaggtagtcggcaaataatgtctagctagaaattcgttcaagccgacgccgcttcgcggcgcggcttaactcaagcgttagatgcactaagcacataattgctcacagccaaactatcaggtcaagtctgcttttattatttttaagcgtgcataataagccctacacaaattgggagatatatcatgcatgaccaaaatcccttaacgtgagttttcgttccactgagcgtcagaccccgtagaaaagatcaaaggatcttcttgagatcctttttttctgcgcgtaatctgctgcttgcaaacaaaaaaaccaccgctaccagcggtggtttgtttgccggatcaagagctaccaactctttttccgaaggtaactggcttcagcagagcgcagataccaaatactgtccttctagtgtagccgtagttaggccaccacttcaagaactctgtagcaccgcctacatacctcgctctgctaatcctgttaccagtggctgctgccagtggcgataagtcgtgtcttaccgggttggactcaagacgatagttaccggataaggcgcagcggtcgggctgaacggggggttcgtgcacacagcccagcttggagcgaacgacctacaccgaactgagatacctacagcgtgagctatgagaaagcgccacgcttcccgaagggagaaaggcggacaggtatccggtaagcggcagggtcggaacaggagagcgcacgagggagcttccagggggaaacgcctggtatctttatagtcctgtcgggtttcgccacctctgacttgagcgtcgatttttgtgatgctcgtcaggggggcggagcctatggaaaaacgccagcaacgcggcctttttacggttcctggccttttgctggccttttgctcacatgttctttcctgcgttatcccctgattctgtggataaccgtattaccgcctttgagtgagctgataccgctcgccgcagccgaacgaccgagcgcagcgagtcagtgagcgaggaagcggaagagcgcctgatgcggtattttctccttacgcatctgtgcggtatttcacaccgcatatggtgcactctcagtacaatctgctctgatgccgcatagttaagccagtatacactccgctatcgctacgtgactgggtcatggctgcgccccgacacccgccaacacccgctgacgcgccctgacgggcttgtctgctcccggcatccgcttacagacaagctgtgaccgtctccgggagctgcatgtgtcagaggttttcaccgtcatcaccgaaacgcgcgaggcagggtgccttgatgtgggcgccggcggtcgagtggcgacggcgcggcttgtccgcgccctggtagattgcctggccgtaggccagccatttttgagcggccagcggccgcgataggccgacgcgaagcggcggggcgtagggagcgcagcgaccgaagggtaggcgctttttgcagctcttcggctgtgcgctggccagacagttatgcacaggccaggcgggttttaagagttttaataagttttaaagagttttaggcggaaaaatcgccttttttctcttttatatcagtcacttacatgtgtgaccggttcccaatgtacggctttgggttcccaatgtacgggttccggttcccaatgtacggctttgggttcccaatgtacgtgctatccacaggaaagagaccttttcgacctttttcccctgctagggcaatttgccctagcatctgctccgtacattaggaaccggcggatgcttcgccctcgatcaggttgcggtagcgcatgactaggatcgggccagcctgccccgcctcctccttcaaatcgtactccggcaggtcatttgacccgatcagcttgcgcacggtgaaacagaacttcttgaactctccggcgctgccactgcgttcgtagatcgtcttgaacaaccatctggcttctgccttgcctgcggcgcggcgtgccaggcggtagagaaaacggccgatgccgggatcgatcaaaaagtaatcggggtgaaccgtcagcacgtccgggttcttgccttctgtgatctcgcggtacatccaatcagctagctcgatctcgatgtactccggccgcccggtttcgctctttacgatcttgtagcggctaatcaaggcttcaccctcggataccgtcaccaggcggccgttcttggccttcttcgtacgctgcatggcaacgtgcgtggtgtttaaccgaatgcaggtttctaccaggtcgtctttctgctttccgccatcggctcgccggcagaacttgagtacgtccgcaacgtgtggacggaacacgcggccgggcttgtctcccttcccttcccggtatcggttcatggattcggttagatgggaaaccgccatcagtaccaggtcgtaatcccacacactggccatgccggccggccctgcggaaacctctacgtgcccgtctggaagctcgtagcggatcacctcgccagctcgtcggtcacgcttcgacagacggaaaacggccacgtccatgatgctgcgactatcgcgggtgcccacgtcatagagcatcggaacgaaaaaatctggttgctcgtcgcccttgggcggcttcctaatcgacggcgcaccggctgccggcggttgccgggattctttgcggattcgatcagcggccgcttgccacgattcaccggggcgtgcttctgcctcgatgcgttgccgctgggcggcctgcgcggccttcaacttctccaccaggtcatcacccagcgccgcgccgatttgtaccgggccggatggtttgcgaccgctcacgccgattcctcgggcttgggggttccagtgccattgcagggccggcagacaacccagccgcttacgcctggccaaccgcccgttcctccacacatggggcattccacggcgtcggtgcctggttgttcttgattttccatgccgcctcctttagccgctaaaattcatctactcatttattcatttgctcatttactctggtagctgcgcgatgtattcagatagcagctcggtaatggtcttgccttggcgtaccgcgtacatcttcagcttggtgtgatcctccgccggcaactgaaagttgacccgcttcatggctggcgtgtctgccaggctggccaacgttgcagccttgctgctgcgtgcgctcggacggccggcacttagcgtgtttgtgcttttgctcattttctctttacctcattaactcaaatgagttttgatttaatttcagcggccagcgcctggacctcgcgggcagcgtcgccctcgggttctgattcaagaacggttgtgccggcggcggcagtgcctgggtagctcacgcgctgcgtgatacgggactcaagaatgggcagctcgtacccggccagcgcctcggcaacctcaccgccgatgcgcgtgcctttgatcgcccgcgacacgacaaaggccgcttgtagccttccatccgtgacctcaatgcgctgcttaaccagctccaccaggtcggcggtggcccatatgtcgtaagggcttggctgcaccggaatcagcacgaagtcggctgccttgatcgcggacacagccaagtccgccgcctggggcgctccgtcgatcactacgaagtcgcgccggccgatggccttcacgtcgcggtcaatcgtcgggcggtcgatgccgacaacggttagcggttgatcttcccgcacggccgcccaatcgcgggcactgccctggggatcggaatcgactaacagaacatcggccccggcgagttgcagggcgcgggctagatgggttgcgatggtcgtcttgcctgacccgcctttctggttaagtacagcgataaccttcatgcgttccccttgcgtatttgtttatttactcatcgcatcatatacgcagcgaccgcatgacgcaagctgttttactcaaatacacatcacctttttagacggcggcgctcggtttcttcagcggccaagctggccggccaggccgccagcttggcatcagacaaaccggccaggatttcatgcagccgcacggttgagacgtgcgcgggcggctcgaacacgtacccggccgcgatcatctccgcctcgatctcttcggtaatgaaaaacggttcgtcctggccgtcctggtgcggtttcatgcttgttcctcttggcgttcattctcggcggccgccagggcgtcggcctcggtcaatgcgtcctcacggaaggcaccgcgccgcctggcctcggtgggcgtcacttcctcgctgcgctcaagtgcgcggtacagggtcgagcgatgcacgccaagcagtgcagccgcctctttcacggtgcggccttcctggtcgatcagctcgcgggcgtgcgcgatctgtgccggggtgagggtagggcgggggccaaacttcacgcctcgggccttggcggcctcgcgcccgctccgggtgcggtcgatgattagggaacgctcgaactcggcaatgccggcgaacacggtcaacaccatgcggccggccggcgtggtggtgtcggcccacggctctgccaggctacgcaggcccgcgccggcctcctggatgcgctcggcaatgtccagtaggtcgcgggtgctgcgggccaggcggtctagcctggtcactgtcacaacgtcgccagggcgtaggtggtcaagcatcctggccagctccgggcggtcgcgcctggtgccggtgatcttctcggaaaacagcttggtgcagccggccgcgtgcagttcggcccgttggttggtcaagtcctggtcgtcggtgctgacgcgggcatagcccagcaggccagcggcggcgctcttgttcatggcgtaatgtctccggttctagtcgcaagtattctactttatgcgactaaaacacgcgacaagaaaacgccaggaaaagggcagggcggcagcctgtcgcgtaacttaggacttgtgcgacatgtcgttttcagaagacggctgcactgaacgtcagaagccgactgcactatagcagcggaggggttggatcaaagtactttgatcccgaggggaaccctgtggttggcatgcacatacaaatggacgaacggataaaccttttcacgcccttttaaatatccgattattctaataaacgctcttttctcttag

SEQ ID NO: 68 - DNA, 12694 bp, Artificial Sequence
  Synthetic DNA vector
gtttacccgccaatatatcctgtcaaacactgatagtttaaactgaaggcgggaaacgacaatctgatccaagctcaagctgctctagcattcgccattcaggctgcgcaactgttgggaagggcgatcggtgcgggcctcttcgctattacgccagctggcgaaagggggatgtgctgcaaggcgattaagttgggtaacgccagggttttcccagtcacgacgttgtaaaacgacggccagtgccaagcttattaccctgttatccctaaccggtcgcagtcgcttcctgtaaatagagcattaaattccatagtcccctgcaggcacgtaataagtgtgcgttgaatttattcgcaaaaacattgcatattttcggcaaagtaaaattttgttgcataccttatcaaaaaataagtgctgcatactttttagagaaaccaaataattttttattgcatacccgtttttaataaaatacattgcataccctcttttaataaaaaatattgcatactttgacgaaacaaattttcgttgcatacccaataaaagattattatattgcatacccgtttttaataaaatacattgcataccctcttttaataaaaaatattgcatacgttgacgaaacaaattttcgttgcatacccaataaaagattattatattgcataccttttcttgccataccatttagccgatcaattgtgctcggcatctagagttatcaacaagtttgtacaaaaaagcaggcttattttaaatatctgtattttgcctccttttcattctattttgtttgatacaaacgattgtggtttgtaatgttaaaattaggaatgttattgaatgatatgtatatttcataaaaataataataataaaagtaggatgaatagtaaaattccaaggcatttcataatttacccattacatggtcaaaatttatcaatattttaaaataataataatcatccaatcaagattttgggaatagaatatcttaagaacttagtataattacatatatatatatatattcccttttaaatgtatcaaaaacaaactaagaacatacaaggaatttgatgtagtactatacaatttacatgcaaacagatgtagtactatttgatgacaaaaaaaaaaaaaaagatgtagtactattttatcttttcatcggaataattcggtcatgaagctattaattggttttaatgagaatttattataacagttgttgccacactgtcgaaatactaacgcctaacggctagttaaataattaacacgcggtgagaagtgagtgagttacacgaaccactaagaatctaatataggaagataagataagcatttcacacgtgtggtgtggacaatttaacagtgttaacacgcgcatggcatgtgatctagaaattagaacattaattttagcgttttgactttgacctttgaatcactaggcgtaggtatttacacgtgtaacaatataatttttttcaatatgtgatgatcatgggccaacgtttgtgggtaaaggtgtggtgttcgatcatgatccacttaaatttactgaattttagaattataacagcagaaggatataagtaatataccaaacttaactataatctacctctccttgtctatgtatactaaatgtctaacatgtaacacaaagctgtacaaaatttttaactctcaaattttttgaaataatgcaaagctgtaaaaatagctgtacgagaaaactgtacaataaaactgaaaataaaaaaatttgtaacgtttttgataaaagttttgtaaatgtataaccatcaaaactgtacaacttccagctttgataatgaattaccattcaaagctagagtttcgaattttttcattgtatacaaccatttgaacacaactcttttcaattatgccatacatacatttagttaataaattttaccgattaactagtactgacaaaagaaacaaagagtaattatatttttttgataaattgttttattagaaaaatacttaaaattgataaaaataaataaacccaattgatatatttgatattacaataccagatattgaaacaaataagacatgttttgtctatatacttccaactagaagatatttatttatccatatcctagatattttaatgtgtgaatctaatacattctcttatatacgaccaaatagtaaaacaatatgcctctcctgcaatttttcttcatccaatatttctacaactttgtatacaaaagttgtaatgttagcttgtgctagcctcggcctcccaaaaacccaaccgccaccgccactagtttcaccggcacctgaaccaagccgtccggccccagccccatccgtttctctctcctctgactcagcaacctcacttcctcaggcccaaccccaggcccgaaaattaaagggcagctcaaagctgaacctctggtcaagaaatcgggccatacggtccggccggaaactgaaccggccggctaaaaatacggcccaggccgccgttgaaattgcgaattatcctcgaaccagggtcgatgggtccgattctgacggagaagatgacggcgatattcgagaggggaaggcgatatacatggtgtctgacggaactgggtggacggcggaacacgccgttacggcagctttgggtcagttcgattattgcttggtcgatcatggttgccctgttaatacccatttgttttctgggatagatgatgtagagcgtctgatggaaattgtgaaacaagcagcaaaagaaggtgctatgcttgtctatacgcttgctgattcatcaatggctgaatctgccaaaaaagcctgcaaactgtggggtgttccatcaaccgatgttctgggcccaataacggagtcaattgcttctcatcttggcgcctcaccttcaggactccctcgtggtgctggaggtgtaaatgttcccctaagtgaagactatttccgaagaattgaagccatagagtttaccatcaagcaagatgatggggctcttcctcagaacttgcataaggctgaacttgtactcactggtgtatctcgaactggaaaaactccactatcaatttacctggcacaaaaaggatacaaagtggcaaatgttccaatcgtaatgggtgtggatttaccaaaaactctgtttgagatagaccctgataaggtttttggtttgactataaatccggtaatcttgcaatcaattaggaagtcacgagccaagagcctgggattagctgaagatgagacgactagctattctgaaatggactatgtgagaggcgagttggtgaacgcgactaaaatcttctcacaaaatcctaagtggcgggtcgttgaggtgactagtaaagccattgaagaatctgcagcagttatcttgaggctgtaccatgacagaaagcagaagtgtttgatgcccagaatatctaagcgctataacccaacttttctatacaaagttgtaatggatacttatagatatatttgaacaactttgtataataaagttgtaaaccgaatatctcttcgaatcacattcatatatatagagtcttgagagtatacacacttgaaaccgtttgtacatacatatacataccattgtgctatgttactcccaggttttgataccttagttttttttacctgcaaatcgatcaaaacccgattttctttgcggagttaccacccagctttcttgtacaaagtggttgataacagcgcttagagctctgccgagcacaattgatcggctaaatggtatggcaagaaaaggtatgcaatataataatcttttattgggtatgcaacgaaaatttgtttcgtcaacgtatgcaatattttttattaaaagagggtatgcaatgtattttattaaaaacgggtatgcaatataataatcttttattgggtatgcaacgaaaatttgtttcgtcaaagtatgcaatattttttattaaaagagggtatgcaatgtattttattaaaaacgggtatgcaataaaaaattatttggtttctctaaaaagtatgcagcacttattttttgataaggtatgcaacaaaattttactttgccgaaaatatgcaatgtttttgcgaataaattcaacgcacacttattacgtgggcgcgccttaattaaattaatggtaccggtacttaatcgaaaaaaaaacagacagccatgtgctcttcggccttaattaatagggataacagggtaatactagtggcgcgcctatttctgaattcccgatctagtaacatagatgacaccgcgcgcgataatttatcctagtttgcgcgctatattttgttttctatcgcgtattaaatgtataattgcgggactctaatcataaaaacccatctcataaataacgtcatgcattacatgttaattattacatgcttaacgtaattcaacagaaattatatgataatcatcgcaagaccggcaacaggattcaatcttaagaaactttattgccaaatgtttgaacgatcggggatcatccgggtctgtggcgggaactccacgaaaatatccgaacgcagcaagatatcgcggtgcatctcggtcttgcctgggcagtcgccgccgacgccgttgatgtggacgccgggcccgatcatattgtcgctcaggatcgtggcgttgtgcttgtcggccgttgctgtcgtaatgatatcggcaccttcgaccgcctgttccgcagagatcccgtgggcgaagaactccagcatgagatccccgcgctggaggatcatccagccggcgtcccggaaaacgattccgaagcccaacctttcatagaaggcggcggtggaatcgaaatctcgtgatggcaggttgggcgtcgcttggtcggtcatttcgaaccccagagtcccgctcagaagaactcgtcaagaaggcgatagaaggcgatgcgctgcgaatcgggagcggcgataccgtaaagcacgaggaagcggtcagcccattcgccgccaagctcttcagcaatatcacgggtagccaacgctatgtcctgatagcggtccgccacacccagccggccacagtcgatgaatccagaaaagcggccattttccaccatgatattcggcaagcaggcatcgccatgggtcacgacgagatcatcgccgtcgggcatgcgcgccttgagcctggcgaacagttcggctggcgcgagcccctgatgctcttcgtccagatcatcctgatcgacaagaccggcttccatccgagtacgtgctcgctcgatgcgatgtttcgcttggtggtcgaatgggcaggtagccggatcaagcgtatgcagccgccgcattgcatcagccatgatggatactttctcggcaggagcaaggtgagatgacaggagatcctgccccggcacttcgcccaatagcagccagtcccttcccgcttcagtgacaacgtcgagcacagctgcgcaaggaacgcccgtcgtggccagccacgatagccgcgctgcctcgtcctgcagttcattcagggcaccggacaggtcggtcttgacaaaaagaaccgggcgcccctgcgctgacagccggaacacggcggcatcagagcagccgattgtctgttgtgcccagtcatagccgaatagcctctccacccaagcggccggagaacctgcgtgcaatccatcttgttcaatcatgcgaaacgatccagatccggtgcagattatttggattgagagtgaatatgagactctaattggataccgaggggaatttatggaacgtcagtggagcatttttgacaagaaatatttgctagctgatagtgaccttaggcgacttttgaacgcgcaataatggtttctgacgtatgtgcttagctcattaaactccagaaacccgcggctgagtggctccttcaacgttgcggttctgtcagttccaaacgtaaaacggcttgtcccgcgtcatcggcgggggtcataacgtgactcccttaattctccgctcatgatgaattcagaaataaattcagcctaattcggcgttaattcagtacattaaaaacgtccgcaatgtgttattaagttgtctaagcgtcaatttgtttacaccacaatatatcctgccaccagccagccaacagctccccgaccggcagctcggcacaaaatcaccactcgatacaggcagcccatcagtccgggacggcgtcagcgggagagccgttgtaaggcggcagactttgctcatgttaccgatgctattcggaagaacggcaactaagctgccgggtttgaaacacggatgatctcgcggagggtagcatgttgattgtaacgatgacagagcgttgctgcctgtgatcaattcgggcacgaacccagtggacataagcctgttcggttcgtaagctgtaatgcaagtagcgtatgcgctcacgcaactggtccagaaccttgaccgaacgcagcggtggtaacggcgcagtggcggttttcatggcttgttatgactgtttttttggggtacagtctatgcctcgggcatccaagcagcaagcgcgttacgccgtgggtcgatgtttgatgttatggagcagcaacgatgttacgcagcagggcagtcgccctaaaacaaagttaaacatcatgggggaagcggtgatcgccgaagtatcgactcaactatcagaggtagttggcgtcatcgagcgccatctcgaaccgacgttgctggccgtacatttgtacggctccgcagtggatggcggcctgaagccacacagtgatattgatttgctggttacggtgaccgtaaggcttgatgaaacaacgcggcgagctttgatcaacgaccttttggaaacttcggcttcccctggagagagcgagattctccgcgctgtagaagtcaccattgttgtgcacgacgacatcattccgtggcgttatccagctaagcgcgaactgcaatttggagaatggcagcgcaatgacattcttgcaggtatcttcgagccagccacgatcgacattgatctggctatcttgctgacaaaagcaagagaacatagcgttgccttggtaggtccagcggcggaggaactctttgatccggttcctgaacaggatctatttgaggcgctaaatgaaaccttaacgctatggaactcgccgcccgactgggctggcgatgagcgaaatgtagtgcttacgttgtcccgcatttggtacagcgcagtaaccggcaaaatcgcgccgaaggatgtcgctgccgactgggcaatggagcgcctgccggcccagtatcagcccgtcatacttgaagctagacaggcttatcttggacaagaagaagatcgcttggcctcgcgcgcagatcagttggaagaatttgtccactacgtgaaaggcgagatcaccaaggtagtcggcaaataatgtctagctagaaattcgttcaagccgacgccgcttcgcggcgcggcttaactcaagcgttagatgcactaagcacataattgctcacagccaaactatcaggtcaagtctgcttttattatttttaagcgtgcataataagccctacacaaattgggagatatatcatgcatgaccaaaatcccttaacgtgagttttcgttccactgagcgtcagaccccgtagaaaagatcaaaggatcttcttgagatcctttttttctgcgcgtaatctgctgcttgcaaacaaaaaaaccaccgctaccagcggtggtttgtttgccggatcaagagctaccaactctttttccgaaggtaactggcttcagcagagcgcagataccaaatactgtccttctagtgtagccgtagttaggccaccacttcaagaactctgtagcaccgcctacatacctcgctctgctaatcctgttaccagtggctgctgccagtggcgataagtcgtgtcttaccgggttggactcaagacgatagttaccggataaggcgcagcggtcgggctgaacggggggttcgtgcacacagcccagcttggagcgaacgacctacaccgaactgagatacctacagcgtgagctatgagaaagcgccacgcttcccgaagggagaaaggcggacaggtatccggtaagcggcagggtcggaacaggagagcgcacgagggagcttccagggggaaacgcctggtatctttatagtcctgtcgggtttcgccacctctgacttgagcgtcgatttttgtgatgctcgtcaggggggcggagcctatggaaaaacgccagcaacgcggcctttttacggttcctggccttttgctggccttttgctcacatgttctttcctgcgttatcccctgattctgtggataaccgtattaccgcctttgagtgagctgataccgctcgccgcagccgaacgaccgagcgcagcgagtcagtgagcgaggaagcggaagagcgcctgatgcggtattttctccttacgcatctgtgcggtatttcacaccgcatatggtgcactctcagtacaatctgctctgatgccgcatagttaagccagtatacactccgctatcgctacgtgactgggtcatggctgcgccccgacacccgccaacacccgctgacgcgccctgacgggcttgtctgctcccggcatccgcttacagacaagctgtgaccgtctccgggagctgcatgtgtcagaggttttcaccgtcatcaccgaaacgcgcgaggcagggtgccttgatgtgggcgccggcggtcgagtggcgacggcgcggcttgtccgcgccctggtagattgcctggccgtaggccagccatttttgagcggccagcggccgcgataggccgacgcgaagcggcggggcgtagggagcgcagcgaccgaagggtaggcgctttttgcagctcttcggctgtgcgctggccagacagttatgcacaggccaggcgggttttaagagttttaataagttttaaagagttttaggcggaaaaatcgccttttttctcttttatatcagtcacttacatgtgtgaccggttcccaatgtacggctttgggttcccaatgtacgggttccggttcccaatgtacggctttgggttcccaatgtacgtgctatccacaggaaagagaccttttcgacctttttcccctgctagggcaatttgccctagcatctgctccgtacattaggaaccggcggatgcttcgccctcgatcaggttgcggtagcgcatgactaggatcgggccagcctgccccgcctcctccttcaaatcgtactccggcaggtcatttgacccgatcagcttgcgcacggtgaaacagaacttcttgaactctccggcgctgccactgcgttcgtagatcgtcttgaacaaccatctggcttctgccttgcctgcggcgcggcgtgccaggcggtagagaaaacggccgatgccgggatcgatcaaaaagtaatcggggtgaaccgtcagcacgtccgggttcttgccttctgtgatctcgcggtacatccaatcagctagctcgatctcgatgtactccggccgcccggtttcgctctttacgatcttgtagcggctaatcaaggcttcaccctcggataccgtcaccaggcggccgttcttggccttcttcgtacgctgcatggcaacgtgcgtggtgtttaaccgaatgcaggtttctaccaggtcgtctttctgctttccgccatcggctcgccggcagaacttgagtacgtccgcaacgtgtggacggaacacgcggccgggcttgtctcccttcccttcccggtatcggttcatggattcggttagatgggaaaccgccatcagtaccaggtcgtaatcccacacactggccatgccggccggccctgcggaaacctctacgtgcccgtctggaagctcgtagcggatcacctcgccagctcgtcggtcacgcttcgacagacggaaaacggccacgtccatgatgctgcgactatcgcgggtgcccacgtcatagagcatcggaacgaaaaaatctggttgctcgtcgcccttgggcggcttcctaatcgacggcgcaccggctgccggcggttgccgggattctttgcggattcgatcagcggccgcttgccacgattcaccggggcgtgcttctgcctcgatgcgttgccgctgggcggcctgcgcggccttcaacttctccaccaggtcatcacccagcgccgcgccgatttgtaccgggccggatggtttgcgaccgctcacgccgattcctcgggcttgggggttccagtgccattgcagggccggcagacaacccagccgcttacgcctggccaaccgcccgttcctccacacatggggcattccacggcgtcggtgcctggttgttcttgattttccatgccgcctcctttagccgctaaaattcatctactcatttattcatttgctcatttactctggtagctgcgcgatgtattcagatagcagctcggtaatggtcttgccttggcgtaccgcgtacatcttcagcttggtgtgatcctccgccggcaactgaaagttgacccgcttcatggctggcgtgtctgccaggctggccaacgttgcagccttgctgctgcgtgcgctcggacggccggcacttagcgtgtttgtgcttttgctcattttctctttacctcattaactcaaatgagttttgatttaatttcagcggccagcgcctggacctcgcgggcagcgtcgccctcgggttctgattcaagaacggttgtgccggcggcggcagtgcctgggtagctcacgcgctgcgtgatacgggactcaagaatgggcagctcgtacccggccagcgcctcggcaacctcaccgccgatgcgcgtgcctttgatcgcccgcgacacgacaaaggccgcttgtagccttccatccgtgacctcaatgcgctgcttaaccagctccaccaggtcggcggtggcccatatgtcgtaagggcttggctgcaccggaatcagcacgaagtcggctgccttgatcgcggacacagccaagtccgccgcctggggcgctccgtcgatcactacgaagtcgcgccggccgatggccttcacgtcgcggtcaatcgtcgggcggtcgatgccgacaacggttagcggttgatcttcccgcacggccgcccaatcgcgggcactgccctggggatcggaatcgactaacagaacatcggccccggcgagttgcagggcgcgggctagatgggttgcgatggtcgtcttgcctgacccgcctttctggttaagtacagcgataaccttcatgcgttccccttgcgtatttgtttatttactcatcgcatcatatacgcagcgaccgcatgacgcaagctgttttactcaaatacacatcacctttttagacggcggcgctcggtttcttcagcggccaagctggccggccaggccgccagcttggcatcagacaaaccggccaggatttcatgcagccgcacggttgagacgtgcgcgggcggctcgaacacgtacccggccgcgatcatctccgcctcgatctcttcggtaatgaaaaacggttcgtcctggccgtcctggtgcggtttcatgcttgttcctcttggcgttcattctcggcggccgccagggcgtcggcctcggtcaatgcgtcctcacggaaggcaccgcgccgcctggcctcggtgggcgtcacttcctcgctgcgctcaagtgcgcggtacagggtcgagcgatgcacgccaagcagtgcagccgcctctttcacggtgcggccttcctggtcgatcagctcgcgggcgtgcgcgatctgtgccggggtgagggtagggcgggggccaaacttcacgcctcgggccttggcggcctcgcgcccgctccgggtgcggtcgatgattagggaacgctcgaactcggcaatgccggcgaacacggtcaacaccatgcggccggccggcgtggtggtgtcggcccacggctctgccaggctacgcaggcccgcgccggcctcctggatgcgctcggcaatgtccagtaggtcgcgggtgctgcgggccaggcggtctagcctggtcactgtcacaacgtcgccagggcgtaggtggtcaagcatcctggccagctccgggcggtcgcgcctggtgccggtgatcttctcggaaaacagcttggtgcagccggccgcgtgcagttcggcccgttggttggtcaagtcctggtcgtcggtgctgacgcgggcatagcccagcaggccagcggcggcgctcttgttcatggcgtaatgtctccggttctagtcgcaagtattctactttatgcgactaaaacacgcgacaagaaaacgccaggaaaagggcagggcggcagcctgtcgcgtaacttaggacttgtgcgacatgtcgttttcagaagacggctgcactgaacgtcagaagccgactgcactatagcagcggaggggttggatcaaagtactttgatcccgaggggaaccctgtggttggcatgcacatacaaatggacgaacggataaaccttttcacgcccttttaaatatccgattattctaataaacgctcttttctcttag

SEQ ID NO: 69 - DNA, 50188 bp, Artificial Sequence
  Synthetic gene circuit
gtttacccgccaatatatcctgtcaaacactgatagtttaaactgaaggcgggaaacgacaatctgatccaagctcaagctgctctagcattcgccattcaggctgcgcaactgttgggaagggcgatcggtgcgggcctcttcgctattacgccagctggcgaaagggggatgtgctgcaaggcgattaagttgggtaacgccagggttttcccagtcacgacgttgtaaaacgacggccagtgccaagctttagggataacagggtaatggtttaccgagctcttattggttttcaaacttcattgactgtgcccctgcaggcacgtaataagtgtgcgttgaatttattcgcaaaaacattgcatattttcggcaaagtaaaattttgttgcataccttatcaaaaaataagtgctgcatactttttagagaaaccaaataattttttattgcatacccgtttttaataaaatacattgcataccctcttttaataaaaaatattgcatactttgacgaaacaaattttcgttgcatacccaataaaagattattatattgcatacccgtttttaataaaatacattgcataccctcttttaataaaaaatattgcatacgttgacgaaacaaattttcgttgcatacccaataaaagattattatattgcataccttttcttgccataccatttagccgatcaattgtgctcggcatctagagttatcaacaagtttgtacaaaaaagcaggcttagatttctatcaatgaaagtagacgttaaaaaaaaaaaaagatatcacagtacgtggaaacacgtgacacatattttaaagggaaaatataaacgtgaaatgcgtggaaactggcaagtagactattaatatttatgggcctatagtggttatatcaggctttattgggctctctatacgaattaaaagcctcaaacaaataatagaacttgaattgtaggcttttgtacccaccaaactggccgccggtgaccccctctcacgccgtatctctttttctttttcttgtttttttttttttttttttttttttttttttttgtgtgcgcgtatttgtttcaccatcaaaaaattaattttgttttaagtgttttattttccttcgttttgtttaaagtgtttaaaatcgttagttcaatgttgaaaaatatacaataatagaaacaattgtgacttttgtaatttgaatgaacaaaacatataacaataagtcctataatataaacattttaatttacattttcaactttttctcattttaaatttttattcagttgaaggcttgaagcgttggactactttagagaaactttacaagaacgttcttaacatctttttttctttcctttttgaatatcaaaatcagttaaaaacacttttgatctcacagaaactgatacaaagccgacggaaccgaccagattaggtcaaaaacgtaaaagacgcgcaaaaagaaaagaaaataactcataatagaatgttttagtcagaagaaaaaagtacaatatgaccaacgtaaacaaaaaagatgttgacgacataaagaaaagagctacagagacaaaggcattaaaatatcttttgtcgaaatctgaagatatttccttaagcgcgtttgcttctctgtctcctccattccattctatatcatctctgtctttgctctaagctttcctgtcaaaacaaaaattcaattccccacgtctgtcttatccacaataaaaccgaccttagcttagcttagactcattactcatttcacaaaaacagagagagaaatagagagacatactttacaggtaataattatcttgtttaattgtattatatatctctaactaaatttgggataaaaattgtctattcttgatcattcctctctgtatctctctgcttttgacaccttctcttagctgttttttcatcttttatctctgtttttaaaatcttttggctctttcgaagggtttcgagtccttttgagttctttgggcttcctcccaaatttctccacgagctcgacccctttcgtatcttccttctcatttttttgccaaatttattcgatccgtctttcactacaactttgtatacaaaagttgtaatgacaggaggctttaggaaatgcatggtgctttgttgtgcaagaaaactcccgaaagaaacaacaatgggaaccaccgcatacgacgaagccattacagggctgagcaagcttctcagtgagaagaaaggattggatgatgtagcagccgcaaaaatcaagcagttaacagcagagttgcagcagggcaccaagcaaaatggtgtttccgaaaacgggtttgacccggatgagcgcatcaaatccggattcatccggttcaagactgagaaatatgagaagaatcctgctctgtacggtgaacttgccaagggccagagtcccaagttcttggtatttgcctgctcagactcccgtgtttgcccctcccacatcttggatttcaagccaggggatgccttctcggttcgtaacatcgccaacatggtcccaccttttgataagacaaagttctctgggacaggggcagccattgagtatgctgtattgcatctaaatgtggagaatattgtggtcattggacacagctgctgtggaggaataaaggggctcatgtccatccctgattgtggcaccacttccacagacttcattgaagagtgggtcaagatcgctcagcctgctaggaccaaggtcaaagcagaagttagtagcgcagagttcacggagcagtgcaagaactgcgagaaggaagctgtcaatgtctctctcggaaacttgttgacatacccatttgtgagggaagcagtaatgaagaaaactctggcattgaagggtgcacattatgattttgtcaatggacgtttcgagctgtggaacctcgaatttggcctctcaccttctaccgcagtaaacccaacttttctatacaaagttgtaatggaacaaaagcttatttctgaggaagatcttaacggtgaacaaaagcttatttctgaggaagatcttaacggacttgatggagaacaaaagcttatttctgaggaagatcttaacggagaacaaaagcttatttctgaggaagatcttaacggttctgcttagacaactttgtataataaagttgtattcttctgtgcaatagcaacaatggaagattgggttcggtttcagttgttgccataccgtataaatgtgttcttaaagagagtctttttgtcgaggcttttcttcagttgggatgtatatgttttattaaggtgatgagtagtgatttggtgtgtcttttcaaatgctttgtggagtctgtttttccttataaaaatttattctaaatctggtttgtattttgggggtcttctttgctctttcttcattaacagaatactaattataagcttttcatatacaaaccttgaaaggaattttcatcagttactaattcgatttcagagaaatgaatcattcaaaacacttgattagagaaatgcttcttgaaccgggtcggtttaacgaaatccactggctggaaaaattatgcttttatatatataagaagcacccagctttcttgtacaaagtggttgataacagcgcttagagctctgccgagcacaattgatcggctaaatggtatggcaagaaaaggtatgcaatataataatcttttattgggtatgcaacgaaaatttgtttcgtcaacgtatgcaatattttttattaaaagagggtatgcaatgtattttattaaaaacgggtatgcaatataataatcttttattgggtatgcaacgaaaatttgtttcgtcaaagtatgcaatattttttattaaaagagggtatgcaatgtattttattaaaaacgggtatgcaataaaaaattatttggtttctctaaaaagtatgcagcacttattttttgataaggtatgcaacaaaattttactttgccgaaaatatgcaatgtttttgcgaataaattcaacgcacacttattacgtgggcgcgccttaattaaattaatggtaccggtgcgtttttatgcttgtagtattgtataatgtttttaagatcccctgcaggcacgtaataagtgtgcgttgaatttattcgcaaaaacattgcatattttcggcaaagtaaaattttgttgcataccttatcaaaaaataagtgctgcatactttttagagaaaccaaataattttttattgcatacccgtttttaataaaatacattgcataccctcttttaataaaaaatattgcatactttgacgaaacaaattttcgttgcatacccaataaaagattattatattgcatacccgtttttaataaaatacattgcataccctcttttaataaaaaatattgcatacgttgacgaaacaaattttcgttgcatacccaataaaagattattatattgcataccttttcttgccataccatttagccgatcaattgtgctcggcatctagagttatcaacaagtttgtacaaaaaagcaggcttaaccgcttaatatcgtatgattagtattaaaaatcttctccagaatttcaacgttgtttttgctactcacgcattgtaccttaaatgatcttattcatcatttctaacaaaacaatttatgcattcttcgccagtagaagaacctagtagagtgctatcggcaacaactccgtcttgttcatgcggatgcaaaagaagacgtccatgcccacgtccacgtccatgtccacctccacgtccacactattcaagaaattatacagacccttgaaaaagaagaatgaagaagagaaaacaaggatcaattatgggattggtacaatatagttgagggtattgtctaatgtagtacttttgaatatgcttatagatttagacatattaaagactattttctccttttaaatcaatgaagaaaatacttgagttcaatccttcttttgcctttgcataaccgtctctcatccacaccaacaaaacaaatcccagaaccttcttttgcagaattttaaagacacacaaagcaatgaataagaacacttggtttacaataacgatcgaaactggtttacaataatgaccgaatatggtttgcaaatatagatgaattggaatttaattgattcgatctatatctaaaattaaatttcttgggttccctaaatactatcctcttagggtttagatttctattatcaaaactctcgtttaatttgagcaaattggttaatcggagaggttagggaaaacaacgttttctggtataaagagacgagagaaacggtattgatggagttaaaagtgatgatgttgatgaaatactgagtcaacgttaataaggcaagagccgactgtgagaagcaaggtttcatggttgggaattttgttgcgcaacggagaagatgaagtgaattttgttgcgcaacggatttccgcaagcttttcccgagaaaacaaagatatcatctacattctatttttgtgctgtaacttttctgaattttttgtaaacaattttttgtgatatatatatatatataaacaattttatatcattaagtatggtactctttaatgtttttaacggaacatgaccaaaactgctagtgaaagcattttgtcttaactttacaaaagaagttatcttttttttaacacaaactggttttcttcggtaaataaaaagactaagtttgtaaatttattcttagacaattatttactattattgccgactaatatgaaaatgcaaagaagtcgtatttggcattatccaaaagaagggacaaaacacttatctcttaaaacttaaattttaagccattcgtttaccaacaatgaatcttgtggctgatgtagaaaccgcgttcacttgtcaacatttagaaataatgttggctttcaaagaattaaatagaaacaaccaaaatgtatgaggttgagcgtcttctatatatttattacaagacttgcgatgaccaaaaacgcaacgaagaacgaaacaactttgtatacaaaagttgtaatgtgtgagagcttcaagagagaataccagctctgcgaggagatcggtcgaggccgcttcggcgtcgtctaccgctgctacaacccctcctccaccgaagattccgacactcctttggctgtcaagtccattgataagcgcctcttcctcgacgacgagaccgaccgtgagtgccttgacaaggaacccaaaatcctccaccttctctctcctcaccctaatattctgcagatccataacctctttgattctgatacccatctcctcattgttaccgatctctgccaagaggagaccctttacgaacgcattatctctaacggccccttctctgagcctgacgctgcggctattttctgtcagctcgccgaggccctcgctcactgccaccgcaactacgtcgctcaccgtgatatcaaaccagacaacatactattcgactcaaggaacaggctgaagctctgcgacttcggctcggccgagtggttcggagcaggagacagagagatgcgcggtgtggtaggaacaccctactacgtggcgccggaggtgctttccggaaaagactacaatgagaaggcggatgtgtggagtgctggtgttattctctacatcatgctcggtggagttccacccttctatggtgagactgttgaggagacttttgaggctgttcttaggggaaatcttcgctttccggccaggattttccgaaacgtttctactcaggcaagggatttgttgaggaagatgatgtgcaaggatgtttccagaaggttttctgctgaacaagtcttaaggcatccttgggtaaccagtggaggattggccaacatgaacccaacttttctatacaaagttgtaatggaaggaaagcctattcctaatcctcttcttggacttgattctacttgaacaactttgtataataaagttgtatactttgagtttgagttactctgtgttcgaattttaaagtatatgtggttttctgttttagtttcgtgtctcaactctcaagtgtagaggaatgttataaactactatgcaatgaaggaactaatacttatgatggtattttactaattatgttattattcataattccatgcattagagccaattgtcgcattttttttctttcagaattcttcaaacttgtcaaatcgaaatctcttctttagaagcgactagattagtttttttcttcaaaagaaattctctactgaatttataatttaaagagttcacgagctgcctactaaaatatgaaaaatatttatgaatccagcaatacaaattgtagctttgcaatacaagaaagaacaacttttcatagagatcaaaaacgctagataaaaaaaaaacggggaagactaactagtaagtaccacgagtataacacattttttggatttagtttctatgattgctttcgccacccagctttcttgtacaaagtggttgataacagcgcttagagctctgccgagcacaattgatcggctaaatggtatggcaagaaaaggtatgcaatataataatcttttattgggtatgcaacgaaaatttgtttcgtcaacgtatgcaatattttttattaaaagagggtatgcaatgtattttattaaaaacgggtatgcaatataataatcttttattgggtatgcaacgaaaatttgtttcgtcaaagtatgcaatattttttattaaaagagggtatgcaatgtattttattaaaaacgggtatgcaataaaaaattatttggtttctctaaaaagtatgcagcacttattttttgataaggtatgcaacaaaattttactttgccgaaaatatgcaatgtttttgcgaataaattcaacgcacacttattacgtgggcgcgccttaattaaattaatggtaccggtctaatacccaatctctcgtcttatccagatgttttatacgcccctgcaggcacgtaataagtgtgcgttgaatttattcgcaaaaacattgcatattttcggcaaagtaaaattttgttgcataccttatcaaaaaataagtgctgcatactttttagagaaaccaaataattttttattgcatacccgtttttaataaaatacattgcataccctcttttaataaaaaatattgcatactttgacgaaacaaattttcgttgcatacccaataaaagattattatattgcatacccgtttttaataaaatacattgcataccctcttttaataaaaaatattgcatacgttgacgaaacaaattttcgttgcatacccaataaaagattattatattgcataccttttcttgccataccatttagccgatcaattgtgctcggcatctagagttatcaacaagtttgtacaaaaaagcaggcttactgaaatttagtagagaaaaatatatgtttttttctacatacagaatagtttgaatttttaaaatcggatttgaattttaaaaatagaaatagtgtttgtaagtaaaaaatatattgtactatttaagatgtatagaaataaaatattgttctatactattttcataactgatttgtaaatcaattttaattttagtatagagcaaaatgttttaaatataaagtaatagtgttggtagtggtgatgagatagtagtttatgttacgttaatatagcattataatcaattaaatgtttttgttggaaggatactaaaccctaagtggataatatattgggaacccaaagatttcaatctaaaatttaatattctttaaccatagaaaaatagaataatatatgtttgtcatcactaccaacataacgagtagcacagcacaagatagtctcttggtagaggaaagaagtggtagtagagaacaccgggtacaccatttgggttccacaatcgagggcacaaggagacacgaactcgccacacttaactagaaattgatgtaactccaaaaaaatccaaaattttacctttgtaaatcaaaacccccaattcaatttaatcacaaaccctagacgtcaattccaaaaattaaatgtattgattccgtcgccaatacatctccattgaacgttttcagaatccgaagctttacaaaaaggagatagtaatttttgggacccaaaaagctgttggaatgttaacagctgatgagaaagtgttttttggaaagagagaagaagaagaagaaaaagagcctgtatctcaggcaaagggtagcattgtcattattacagaaaatacaaataatatcagtatctttttgtgggatggttagttacttaattataatttttttgtagattaaaaactcaaatttctcaaaattatactctcctaagtagaaaaattttacaagtttgatttcttgaaaattgatattataatttatttttctgattagggtgggaagattctttataatttttttggtttacctgaaaatgaaagaaaagattgtaagaaagatacaacaagtgtagactggatcttttaaagtccaaaccaaaagccaaaaattaggtaacctaaatatgtaagactttattttttggtttttcttattaaaacaacatttcgataattcattatgatattttttacgctatgatcctcagccttaaactttcattcgtatagaaggataatatcataatagtacaactcttttaattgccaccaatcaactttattgtctgctttcaaaaattttattttttataaaatattattcattttagctataactcaatttggaacttttattcgtcccaaataaaatatctttccaagagagatggaaaaatagcttcatatagagatattttcaacaacttgtccctctctaaactcatccaccttccaaaacagagaaggggaaaatacaactttgtatacaaaagttgtaatgtcgactgtgaagctagataggcttacgtcgattgatgcccaattgaggctgcttgcacctaagaaggtctctgaggatgataaacttattgagtatgatgctttgctgctcgatcgcttccttgatattcttcaaaacttacatggggaagacatcaaagaaacggttcaagaattgtatgaacaatctgctgaatatgaaaggacacatgaccccaagaaattggaggagctgggaagcatggtgaccagtttggatgctggagattccattgtggttgccaaatcattttctcacatgcttaacctggctaaccttgctgaagaagtccagatttcccgtcgcaagagggtcaaaaaagtgaagaaaggagattttatggatgagaatactgcgatgactgagtcagatatggaagaaacactgcggaggcttattgtggatttgaagaaatccccacaagaaatttttgaaactttgaaaaaccagacagttgacttagttttcacagctcatcctacacaatctgttcgtagatccttgcttcaaaaacatggaaggataagggattgtttggcccaattgtatgccaaagacattactcccgatgataagcaggagcttgatgaggctctgcaaagagagatacaagctgcatttcgtactgatgaaatcaggaggactcagccaactccacaggatgagatgagagctgggatgagctacttccatgagacaatttggaatggtgttccaaaatttttgcgacgtcttgacacggcattgaagaacataggaataactgagcgtgttccctataatgcccctcttattcagttctcatcttggatgggtggtgatcgagatggaaatccgagagtaacacctgaagttactagggatgtatgtttattggctagaatgatggctgctaatatgtatttctcccagatagacgagctcatgtttgagctctcaatgtggagatgcaccgatgaacttcgtgaacgagcagaggaacttcacaaatattcaaagagagactccaaacactacattgagttttggaaacaaattccttccagtgagccttatcgtgttattcttgctgacgtgagggataagctctactatacacgtgaacgttctcgtcagttgttggcaagtgaggtctctgaaatccccgtcgaagcaaccttcaccgaaattgatcagtttctggagcctcttgagctttgctacagatctctctgtgcttgtggtgataggccagttgcggatggaagtcttcttgatttcatgcgacaagtagctacctttgggctttgtcttgtaaagcttgatattaggcaagaatcagagaggcatactgatgtgatggatgccattactacgcacctgggcattgggtcctaccgagactggacagaagagaagaggcaggattggctcttatctgagcttaggggcaagcgccctttgtttggccctgatcttcccagaactgatgaaattgctgatgttttggacacaataaatgtaatcgcagaactcccatctgatagtttcggcgcttatgttatctcgatggctactgccccttctgatgtgcttgctgttgagcttctgcaacgtgaatgtaaagttaaaaagcctttgagggttgttccattgtttgagaaacttgctgacctggaggctgctcctgcttctatgacccgcctattctccgtagattggtataaaaataggattgatgggaagcaagaagtcatgatcggatactctgattctggtaaggatgctggtcgtctctcagccgcttggcaaatgtacaaggttcaggaagagctgcttaaggtttctaagaaatttggggtgaagctcacaatgtttcatggacgaggaggaacggtgggaagaggagggggtcctactcatcttgctattttggcacagccagctgaaactattggtggatcacttcgtgttacaattcaaggtgaagtgattgaacaatcctttggagagcagcacttgtgttttagaacactccagcgttatacagctgctacacttgaacatgggatgaatccaccaaaatctcctaagccagaatggcgtgctctcttggaccagatggctgttgttgccacagaggaataccgctccatagtttttaaggagcctcgatttgtcgagtacttccgtctcgcaacgccagaaacggagtatgggcgcatgaacattgggagcaggccatcaaagagaaagccaagtggtggaattgaatctctccgtgcaatcccttggatctttgcatggactcaaactaggttccatctgcctgtgtggctgggcgttggcggagcacttaaacatgtccttgagaaagatataaggaaccataacatgcttagggacatgtacaacaatttccctttcttcagggtgaccattgatttgcttgaaatggtgttcgctaagggagaccctgaaattgccgctttatatgacaaactactggtgtcagaggagctgcagtcctttggggagcgtttgagggcaaattatgaagacactaaacgccgtctcctcgaggtcgctgggcataaagacctgctagagggagatccttacttgaaacagaggctccgccttcgtgatccctacatcacaaccctcaatgtctgccaagcgtataccctgaagcggattcgtgatcccgacttcaaggtaacagagaggccacacttatccaaggaaatcatggacgcacacaaggcagctgctgagctggtgaagctaaaccccactagtgagtatgctcctggacttgaagacacacttatcttaaccatgaagggtgttgctgctggtctgcagaacactggtaacccaacttttctatacaaagttgtaatgtctcatcatcatcatcatcatgcttagacaactttgtataataaagttgtagattcatagatcatatatatgtacatcatatccctctttagagcaggtactcgtgttcacctgcaaatgtaacaaagaacattatactatacaacaaatatacacattgaattatacctgtataaccaacataggtcaagattacatcatacgtgggctaggcccattttatattggcccaataagtgagtgactaaatcctttcgttcccaaatatatctccaccgatcaagagattcatcttccacccagctttcttgtacaaagtggttgataacagcgcttagagctctgccgagcacaattgatcggctaaatggtatggcaagaaaaggtatgcaatataataatcttttattgggtatgcaacgaaaatttgtttcgtcaacgtatgcaatattttttattaaaagagggtatgcaatgtattttattaaaaacgggtatgcaatataataatcttttattgggtatgcaacgaaaatttgtttcgtcaaagtatgcaatattttttattaaaagagggtatgcaatgtattttattaaaaacgggtatgcaataaaaaattatttggtttctctaaaaagtatgcagcacttattttttgataaggtatgcaacaaaattttactttgccgaaaatatgcaatgtttttgcgaataaattcaacgcacacttattacgtgggcgcgccttaattaaattaatggtaccggtgaattcccttatgtgagtgtaaaaggcaggcgagtttgtccccctgcaggcacgtaataagtgtgcgttgaatttattcgcaaaaacattgcatattttcggcaaagtaaaattttgttgcataccttatcaaaaaataagtgctgcatactttttagagaaaccaaataattttttattgcatacccgtttttaataaaatacattgcataccctcttttaataaaaaatattgcatactttgacgaaacaaattttcgttgcatacccaataaaagattattatattgcatacccgtttttaataaaatacattgcataccctcttttaataaaaaatattgcatacgttgacgaaacaaattttcgttgcatacccaataaaagattattatattgcataccttttcttgccataccatttagccgatcaattgtgctcggcatctagagttatcaacaagtttgtacaaaaaagcaggcttaaaagaagagagaggaaggagaagagaagaaaaagaagagagacacaacggagcgccaagaggctgatgaacacgtcaccgtacacgtgtcatgatcttgaagggtttgcaaagggaacgcatatgctgagctggcaaccctagatctgcgctggacattttaaatatctgacttaaataatgattggtacacgtagtcataatcgccaccgttcatcttgagatctctacgtagacttgacgtgctgctgattttattccttttaaataatgaaaatacagaattaaactataatgtataattcatttgagatccacagatgacgaaacgtggactaccaaatcaagcatatttgtttttaccatttaatcgacggctaatattgatttcatctacggtaaaatatatctttttttaaccagaaaaaggttagagtggtccccactgtaggatctactgacttgtgtcggccgttagtggttttataaagctgacgtgtcccactgaataaggaataccgttgtggtccctacggacaacgtgggattcgacgccagctcattttttaattttttcttgaaatcttttttaaaattttagacgatgactcaatcttcgccacgtaggatccacccaataaaaaagggttaacaaaatcttatctttaatgctaaattagttgagattaatccatgttgtttaaatccgaaatgatgcatataatcttgtttcttataatcattaagatttagactgaagatctaattccaatttaagagagtcactaaaaaaagaatgaattcaatttcagacaaatccgacaaggtcaaggtgacgtgttcttgatgccaattctagtgggagccacttgacgcgtgcagttagactcccggtccaagacataaatttacgttaataccctcctttattgggttattattgggccgtagttgaattattagacccaacctttttatcctgttcttgattggcacatactttgcaaaaagttaacaaaataacttttattgcaaggcattacaagagaaatgtcaaatttggttgttgcatacatgacatcttattcatatccaatccataaattgatgtgttgttattcaaactggtcttttgatgtattgttagacatatctcatatatattgaacccttggaatcaatataatagattgggctttatttatcttttattgggcttaaagggaattgttggactaaaaaaaccattaaggctataacacactaattacacgtacaatgagagtgagagtcacggacgggatgattacaagaatcatatagcaccaaatatctcatcctcactctcacatacaaacacacattttgttcacacagagatagacacaactttgtatacaaaagttgtaatggccgttgaacctcttcgcgttcttgtcaccggcgccgccgggcaaattgggtatgctctcgttcccatgattgctaggggaataatgctgggtgctaatcagcctgtgatcttgcacatgctcgatattcctccagcagccgaggcattgaacggagtgaaaatggagctggtggatgctgcctttccacttcttaaaggcgttgttgctacaaccgatgctgctgaagcctgcaaaggtgtaaatgttgctgtcatggttggtggcttcccaaggaaagaaggcatggagaggaaggatgtgatgtcaaagaatgtttccatctacaaggctcaagcttctgctcttgagcaacatgctgctcccaattgcaaggttttggttgttgccaaccctgccaacaccaatgctttgatcctaaaggaatttgccccatcaatcccggagaagaacatttcttgtttgacaaggcttgaccacaacagagctctaggtcagatctcagagagattgaatgttcaagtctctgatgttaagaatgtgattatttggggaaaccactcctcaactcaataccctgatgtcaaccacgctaccgtgaaaacacagggtgttgataagcctgttcgtgagcttgttgctgatgatgcatggttgaatggagagttcataacaactgtgcaacagcgtggagctgccatcatcaaggcaaggaagctctccagtgcattgtcagctgctagttctgcttgtgatcacatccatgattgggtgcttggaaccccagagggaacatgggtatctatgggtgtgtattctgatggctcgtacaatgtgccagctggaatcatttactccttcccagtaacttgtaaaaatggagaatggacaatcgtccaagggctgccaattgacgatgactcaaggaagaaaatggatgcaactgctgcagagcttgtcgaggagaagacattggcctactcatgcctgactaacccaacttttctatacaaagttgtaatggctggatctactggagcttcttggtctcatcctcaatttgaaaagggaggaggttctggaggtggatctggtggaggatcatggtctcatccacagttcgaaaagggagctggatctaggcctatttgaacaactttgtataataaagttgtactttgtataagatcattagttgttaattttttaaatatgaatttctaaactatccaccaactaagcatgttgtgacaagcaaaagtatatagataattagatattatatgtatatgtttaaaattgcgtaatatgctttacaggtcgattgttctcctaatcatttgattcttcttaatttattggattacgaaatgacatttctttgtcacctttttcgtgcatatcagatttgtttaaagtttacgtgacgaatgacgattgatcttttatcttgttgtgccgccgtattttgtatggacattacttgtaatactatatatatcagctatgcgttaactatactcatcaaataccacatatgatttattatatcaaagtacttattaataaataattaaattaaccttatattcaattgcacttgggtgagaaagccgttagaaaaaactcccgctatagaagaaatgtggtagatttgaaccgaaattaaatattttcacccagctttcttgtacaaagtggttgataacagcgcttagagctctgccgagcacaattgatcggctaaatggtatggcaagaaaaggtatgcaatataataatcttttattgggtatgcaacgaaaatttgtttcgtcaacgtatgcaatattttttattaaaagagggtatgcaatgtattttattaaaaacgggtatgcaatataataatcttttattgggtatgcaacgaaaatttgtttcgtcaaagtatgcaatattttttattaaaagagggtatgcaatgtattttattaaaaacgggtatgcaataaaaaattatttggtttctctaaaaagtatgcagcacttattttttgataaggtatgcaacaaaattttactttgccgaaaatatgcaatgtttttgcgaataaattcaacgcacacttattacgtgggcgcgccttaattaaattaatggtaccggttgcttgcaaaagcagtaattggaaagcactctcaaagaatcccctgcaggcacgtaataagtgtgcgttgaatttattcgcaaaaacattgcatattttcggcaaagtaaaattttgttgcataccttatcaaaaaataagtgctgcatactttttagagaaaccaaataattttttattgcatacccgtttttaataaaatacattgcataccctcttttaataaaaaatattgcatactttgacgaaacaaattttcgttgcatacccaataaaagattattatattgcatacccgtttttaataaaatacattgcataccctcttttaataaaaaatattgcatacgttgacgaaacaaattttcgttgcatacccaataaaagattattatattgcataccttttcttgccataccatttagccgatcaattgtgctcggcatctagagttatcaacaagtttgtacaaaaaagcaggcttactctttctaatttcaggttataatttattaattttggcggagtaaaagtagatgaccgttacaagtctgatttattagactgtgaaattggaccgttgttatgtgggccatggcttttattaaaaaaagaagagaaggtatattatttaaattggagataatgggccgttttaaacccaattattattggtccactaaagtttttatatcctctaacttcgacgagcttgatatagttttggaccttttggtgtgaacggtcacattcaactaaattaaaaagtccaacaaacaaaatctggtcatgaaaagcttggtgtgatgtttctaataagtaaatttactgaggttaattggttggtttaacttaaatgtaatccaaactcctctccctttagagattttcagttgggaatgaaaacctttaaagcttgcaccctaaaatgacattaatggttatagatatagtttgttttcatgtttcttttttttttatattttcctttagttttttctagggttgggactaaataatcggactcggatccgagatccgatttgaaaagctggatacccaattgggatggatccgcttccggatcctgaatttttagattcagatgaatatttttttttaaactaaagaaagcatatcagcatcacatttttgtggtgatactgcttcaagaatctgtcacatatctgtccaaaagaaaagaatttgtcacatattgtataattttaatatatttattgttttagtttgaaaacaaacgtggaaaaaaacatcttacaggtgtcaggtgtgccgcgtcgtcccactcaaagcctatatcatcaattttctggctgttctaatctactcaatttatttttttattgttaatttactgaagatcggcgacaactttgtatacaaaagttgtaatggcggggaaattcggatcactgaggcagagtttcattgaaagaagcaaagagaggttgctatctcgaagagggtattcggagctagggttacctggctccgatggtgatgttgaagatgagggcaatagcgatgtcaaatgcggttgtttccgatcaatttgcggcgggagaagtcgaaattccgatagcggaaatcgatctaagggcggatgttaccggtggatttgtgatcggatattagggttctgtaatgggtttaaggaagttgcaggtaaattttatgagatgggtcgatctgatcctcgaaaggtgttctttgcagcgaagatgggtgggagcttagctttggtttcaatgctcatcttcttgaggggacctttatcggatattcgtcagtatgctatttgggctattttaactgtcattgtctgtttcgagtacagcgtaggagcatgtcttagtaaaggccttaaccgtggtctgggaacggtaactgctggaagtattgctttcgggctagcagaattagcagttcggtctggtgaatacaaagaaccgctcattattatgtatatgttcttcgcaggttctattgcgacctacattaaattatacccaacaatgaaagaatacgaatatgggtttcgggtattccttatgacatttgccatagtaatggtgactggaaataaaacaacaaattttttccaaactgcttttttccggttgttgcttatttcaattggtgctgtcatagcttcagtggttaacatatgtgtttaccctatttggtctggcaccgatcttcataaggtggtggtgaaaaatttcaagggtgttgctacttctttggaaggctgtttaaatggatacttgcagtgtgtagcgtatgataaaatcccttcaaagattcttacgtaccaagcttatgatgaccctacatatggtggctatagaacagctgtccagtcagcaagtcaagaagaaactctgttgagctttgcgaaatgggagcctcctcatggcccttatagatcatgcaattatccttgggaatcctatgttaaagttagtggggcactgagacattgtgcttttatggttatggcaatgcatggatgcattcttgcagaaatacaggcaccaccagagaagagacaggtttttgccgatgaacttcgcagggttggcatggccggtgctaaagtcatacgtgaacttgggaacaaagttgagaaaatggagaaactaagccccggtgatatacttgcagaagtacatacggcagcagaggagctgcaaatgagaatcgatgagaagtcttatctcctggtcaatttcgagaaatgggaagaaggcaaacgaccaaaggaatttgatgaccctgagcgtgtttctcaaatgaagagttatggaagtggtcagcttgttataaactccctaagtgaagcagtgctaagtattgaacccgagcagatgcaatcatacattgataatatgagttcaagggtttcaatgattggtgctggcccttcattgcaaggtatgttttccactgatagtatggcgactagaactcagtggccttcacgtctttcactcctaccagacctgagcatcaatgaaaaggaagcgaaaacatatgagagcgcaagctccttgtcactagcaacttttgcttcacttctagtagaatttgtggcaagacttggatatttggtggaggcctttgaggaactcagtgagaaagcagctttcaaggagcaaagtgagctagaagacgaaaaggcgagtaatgggctctggcataagttgatggtgtcccttcagttcagaaataacccaacttttctatacaaagttgtaatggcttctatgactggtggacagcaaatgggtgcttagacaactttgtataataaagttgtaaggttgaagaataagaattaaaaaattgtatttaaactataaaatatgcatacataataaattttgatcgtttttaactaataaaacatatggtgtatcatttcaatctcacatgaattaaatcttggtgtgtatagactatacagtatagtagtttgttttgtaaaccgaaatcagaacactggctgctggccggtttacttaatttatgaatctatatatacatttttgcagtcattttgtgaaataaatcctgtagttgggacttatttacaatggctgccactggattttaatgtttgtttttgataattagaaaaaaaatcttcgaattaaatattttacatttaacaatcttccctaaatctctccacattaactacacggttagttactaaaattaaacttccaaaatatttaatatcatttaattactacaaaattatcatttttgatattgtttttctccatgactataacaattcgactataatcatcaacacccagctttcttgtacaaagtggttgataacagcgcttagagctctgccgagcacaattgatcggctaaatggtatggcaagaaaaggtatgcaatataataatcttttattgggtatgcaacgaaaatttgtttcgtcaacgtatgcaatattttttattaaaagagggtatgcaatgtattttattaaaaacgggtatgcaatataataatcttttattgggtatgcaacgaaaatttgtttcgtcaaagtatgcaatattttttattaaaagagggtatgcaatgtattttattaaaaacgggtatgcaataaaaaattatttggtttctctaaaaagtatgcagcacttattttttgataaggtatgcaacaaaattttactttgccgaaaatatgcaatgtttttgcgaataaattcaacgcacacttattacgtgggcgcgccttaattaaattaatggtaccggtagataagttgatttagccataaaatattgtttccgtgacccccctgcaggcacgtaataagtgtgcgttgaatttattcgcaaaaacattgcatattttcggcaaagtaaaattttgttgcataccttatcaaaaaataagtgctgcatactttttagagaaaccaaataattttttattgcatacccgtttttaataaaatacattgcataccctcttttaataaaaaatattgcatactttgacgaaacaaattttcgttgcatacccaataaaagattattatattgcatacccgtttttaataaaatacattgcataccctcttttaataaaaaatattgcatacgttgacgaaacaaattttcgttgcatacccaataaaagattattatattgcataccttttcttgccataccatttagccgatcaattgtgctcggcatctagagttatcaacaagtttgtacaaaaaagcaggcttattaataaattagtaatgaacacctagactcgtatcttctaatctcaatgtttaatgaatggtaaaaataattatttaattttccgtggtcaacaatgcataatctttttatttattttgtcttcttacctttcaaaaatttctcaacttgtcaacagaaaaaataaaaatcccaataacaaaggtgacaaccgaaacagaagcacatgaccacaatgctaaagatggataaaaaaaatagagcaaaaagaaagacaaaaatttcagtagtcaagagtataattaagcacgtataatttgcaaaatttttattttatttttatgaaccgtttggtgtatatatataatccttgctttccagttttgatgatctttttgtgctactttgtatgcggttaaagattgttgtaataggcaaagaaatcttaagtaatgcctcagctgttaaacgttgtgatctcctctgttcaaaatatttcaagttgatcttacttatggtaatgctctactcgtgattgtgagtttgaactagtcactgttaaggttttctttataattgattgtcaagctaatgaataagtttgtgaatgaggttttagaaagatgcatgattggaagttgtgtttagtaaatgcttctcattacaactagaatttactatagaatcatagaacggccataaccaaacttcatgagtccggtgatattattggaatagaattcacataattttcatacttttgttacttagactgtctacataatgccacataatgaaaatttgaattagaaaacttgaatactaaatctacagatatttcaagtgacttctaatgtatgacaataagacattaagaccccttccatatcatgaccatttcaaactcgtgtcaatatgtaacccatttatcgtgggccataaacccaaaataataaatcatgtatataaacgggctattgggccataaactagtgataataagctttggggcgacgatctctggatacgtcacccctcgcgatacaattacaaccgatcaaggtcagcgaatactccgacatccttttcttgcggcccacatcggtctttagtgaatcacatgttttttctattgtcgtttcttgcgcatcaagttctgctgaggtttcttgttattttatttttgaaatttttcaacacctttaacttatctcgattttgtttaccacttaaaaaacgcccaaccaatggcatacactgaaaatgttttctaaacatttaatatttctgtggctaccaaaaagaaatcaagagttattttccatttattctgggtgaaagagaaacagagtgccacctgtcatttcctaatctggcacgtaggtttttctcatacgtattacagtgaataatacagtataccaaaggcggctcgtagcagagtttgttcgattctcttaaccacattaggtttggagtattatttgcttctctcgattgaagaagagtacctaaagaatcacaactttgtatacaaaagttgtaatgaatcataatcacgatcccaaaactccccttctcccaacccatcatgatgatgatcatcaagggcggccaacacctgagcgttccacctcagttatcatgtcccttgccacacccaacacggccttcgtcctcctaggacccctcttgtgtacccttgtaatgttgtgtgtcaagttcgatgggaccgagtcgagccggaacatgctggctatcctggtctggatcttcacgtggtggctcaccgaggctgttccgatgcctatcacctccatgtcgccgttgtttctatttccggtgtttggtatcgcctcggccgacgctgttgctaagtcgtacatggacgatgtcatctctcttgtgcttggtagcttcattcttgctcttgctgttgagcactacaatattcacaagaggctggccttgaatataacattgttattctgtggggacccagtgaacccaccgttgctcctcctggggatctgcgccaccacagctttcgtcagcatgtggatgcacaacgtggcagccaccgtcatgatgatgccagtggccaccggaatcctccagagatttccatccacaagagaaggcggccgaaacgacgccgttgacaagttcagtagggcagttgtgcttggggtgatatactctgccacaattggtggtatcagcactctgactgggacaggtgtcaacctcatattggctggcatgtggaagagctatttccctcaagcggaccccatcagcttcaacacgtggctcttttatgggttcccattggctgtctttatcttcttctcgttgtgggccatactttgttgtttgtattgcaaacgtgggtcgggccgggtccttcaggagtatttggataaggatcaccttcaaagagagctcgacttgttaggtccaatgtcctttgcagaaaaaatggtattatccgtctttttggggcttattatgctatggatgacaaggaatctaaccgatggtatccctggatggggagctctatttaaagggagggccggtgatggcactgctagtgttatgatggcaactttgttattcataatacccaacaagaggagaaagggagaaaagctaatggactggactaagtgcaagaaactaccttggaacgttgttcttctacttggggccggctttgccatcgcagatggggtgcggtcaagcggcctagcggacgtgctttcccgcgccttggacttcctagagacggctccattttgggcaattgcacccatggtgtgtctcataggtgggatcatgaccgagttcacctccaacaatgccaccacgacattgttggttcctctgttgatccaaattgcacagacgatgcacgtgcatccgcttcttcttatggtccctggagccgttggggcccaattcgccttcttgcttccgactggaactccttccaatatagttgggttcaccactggtcatattgacatcaaggatatgattaaaactggtctccctctaaagattgctgggacagttgtactctcatttttaatgcctacccttggagcctacgtttttgggacaaacaacaaaccgctgatgtacccacaaagttggcgtagtttgtattcaaattcgggatatacaaacccaacttttctatacaaagttgtaatggactacaaagaccatgacggtgattataaagatcatgacatcgattacaaggatgacgatgacaagtgaacaactttgtataataaagttgtatccatatcccctccacttcgccacgtgcttcttcttctctatgtctctatcttgttcactttatgacctctaatcagttgaaatcatatgttgtttacttggaacaattcaatgaaattcagcattttagaaagacagggtattgactttgaaattgaatcatctggtttgactgatagtcaatttaaatggtattaacttttgactaagcacagttagttttcaacatttttaaaattgaacaattaaattgaaaaaacctataagctatggttaaagattgattagtaaaaaatgtttgcttttgcataagagtagaaaaagttttatgggtttaatattttttgtatcaaacatttgaaatatttcttgtatatctgtaaaattattttaaaatatctattataagatttatatgagttttccacttccacatgattcatgtgatacagaaagtgcatctcaaaacttctagagtttccctaccaaaaaaaaaaaaccacccagctttcttgtacaaagtggttgataacagcgcttagagctctgccgagcacaattgatcggctaaatggtatggcaagaaaaggtatgcaatataataatcttttattgggtatgcaacgaaaatttgtttcgtcaacgtatgcaatattttttattaaaagagggtatgcaatgtattttattaaaaacgggtatgcaatataataatcttttattgggtatgcaacgaaaatttgtttcgtcaaagtatgcaatattttttattaaaagagggtatgcaatgtattttattaaaaacgggtatgcaataaaaaattatttggtttctctaaaaagtatgcagcacttattttttgataaggtatgcaacaaaattttactttgccgaaaatatgcaatgtttttgcgaataaattcaacgcacacttattacgtgggcgcgccttaattaaattaatggtaccggttctgagtcacggcttcattggcattccgtacaacgaacgtcccctgcaggcacgtaataagtgtgcgttgaatttattcgcaaaaacattgcatattttcggcaaagtaaaattttgttgcataccttatcaaaaaataagtgctgcatactttttagagaaaccaaataattttttattgcatacccgtttttaataaaatacattgcataccctcttttaataaaaaatattgcatactttgacgaaacaaattttcgttgcatacccaataaaagattattatattgcatacccgtttttaataaaatacattgcataccctcttttaataaaaaatattgcatacgttgacgaaacaaattttcgttgcatacccaataaaagattattatattgcataccttttcttgccataccatttagccgatcaattgtgctcggcatctagagttatcaacaagtttgtacaaaaaagcaggcttaagcttatagcgtagagatgattcactgatgttagtttcattcctatggaataacaaaatgcttttgatggtatcttcatgaacatgtacgttcacaactatctttgtagctctataactatttggtaactccggtttaagcaaagttctacactttaataatatcgacttcgttaatatatacaaatgaaaatagtcttatagatgcgagagcaaatgtttgagggtaggttaaaggaatcttgagatatggataaacgacactaagttgtgtcgtagcgagacagatccaaactacgacaagtagtaaacggagataataatatccaaaccataagaatccatgaaagcaagtagacaactgcgactttgcctcaccagtcaccatactaataattggagaggtggatctcttaggaatatttacttttataaaagatcagaggctagtcagaactcagggactaaattttattttcagtagtgacatctttaaaagacaacagagatttataaaactccacgtgtacagaagtgaaacagtctgacatgatgcctgatgctaactaactatgtaagataagacatatcttacatagttagttaccatgtaatagtaagtgataacccaaaaatgcaaaaaaaaacatccaactagaacatgtgatatgtcagtatgtgtatgagatcatgtgcacaataatattatcggtatttgtatgtctagttgtctacactctacagctcttactggaaatagattttgaggaacaagaaatagttgaatgagtcattgctatcttctagattttttttttttctgtcataatatcttctagaattttattacttgggaaagcgatatatgatatattctttttccaaaatttactaattaaaaaaaaaaaaaaaaactaagcactctgtatttattgccatattgaaaatgctctttccaccaatattccttatttgcctcaaatcattactttcggattctactgtcttgaactgtgttcatgtgtgtattccctcatcaatcaccttcaattcatattttcctatttccaaaaataaaaagatacagtatctatgtatttaattatatatcatatcaattatatcataataatcataagatcctttttatcgaaataaaaaaggaaacaaatccaatcatagcaagctttttcttttatttaataaacaaaaataaaaagcttcccgaaatggttaaaatccagaaccactaaagtcaaccaaatttgtcaaattcatccacgtcatcagttccatctataaaacgctcacgccattcgtcaagtcccaaaacaagagtccaccacaactttgtatacaaaagttgtaatgggtggtagcaatgcattgaatgagatgaccaatggatctgatggtattactgggggtgttgctgatgtctatggtgaagagtttgccacccaggatcagcttgtcaccccttggagcttctctgttgcttgtggtcattcattgttgagagatccccagcacaacaaagggcttgcttttacagagaaagagagagatgcccacttcttgcgcggtctgttaccccctgtagttctgtcacaagagctccaggagaagaagttcttgacgactcttcgtcaatatcaagttcccttgcagaaatacatggccatgatggatcttcaggagaggaatgagaaactgttctacaaacttcttgttgaccatgtcgaagaactgcttcctcttgtttatacgccaactgttggtgagggatgccaaaagtatggaagtatttttagacgtccccaggggctattcatcagtttgaaggataagggaagaatccttgagcttttgagaaactggcctgaaaagaaaattcaagttattgtagttactgatggtgaacgcatactggggctaggagaccttggctgtcagggaatgggaatacctgttggaaaactttccttgtattcagcccttggtggagtctgcccatcagcatgcttgcctataacccttgatgttggcaccaacaatcagaagttgttagatgatgaattttacattggattgaagcagaagcgggctactggagaggaatatgctgagtttgtccaagaattcatgtctgcagttaagcaaaactatggggagaagatccttgtacagtttgaagattttgccaaccataacgcatttgagttgctggagaaataccgcaccactcacctcgtcttcaatgatgacattcagggtactgcttctgttgttcttgcaggacttattgcttctttaaaactactagggggaaccttggctgaccataaatttttgttcctcggtgctggagaagctggaacgggtattgcagagcttatagcccttgagatgtcaaagaagacaaaggctccagtagagcagatgaggaaaaagatttggcttgtcgactccaagggacttgttgttagctctaggaaggagacacttcagcagttcaaactaccttgggctcacgaacatgaacccattacaactcttatagatgctgtccaggcaatcaagcccacagtgttgattggtacttctggaaaagggaaacaatttaccaaggaggtcgttgaagccatggcaaatatcaatgcgaaacctctcattcttgctctatcaaatcctacttcacagtcagaatgtactgccgaagaagcctacacatggagtcagggacatgcaatatttgccagtggaagcccatttgaccctgttgaatatgaaggaagaacttttgtccctggccaggcaaataatgcttacattttccctgggtttggtttgggtctgatcatgtgtggtgcaatccgtgtccatgatgacatgctattggctgcctctgaggcactggcttcacaagttacaggagaacatttcataaagggacttatctacccaccattcaaggacatcagaaagatatcagctcacattgctgccggagtagctgcaaaagcttatgaacttggtttggctagtcggcttcctcaaccagccgatcttgttaagtttgccgagagctgcatgtacaaccctacttaccggagtttccgtaacccaacttttctatacaaagttgtaatggaacaaaagcttatttctgaggaagatcttaacggtgaacaaaagcttatttctgaggaagatcttaacggacttgatggagaacaaaagcttatttctgaggaagatcttaacggagaacaaaagcttatttctgaggaagatcttaacggttctgcttagacaactttgtataataaagttgtatttgttatgtaacttattcttctaataaaaaactccgctagttcatatcttgttaagtatttggttagcctaagaaattatatagcttgaggtttcacattttcaatattttttaaaaataatttgggtcaatattgatgttggaaatgaaatcaacggttgaattattgtcgtgtgctgcttgcaccatggtccatgctagatggaccgaccactatttttccaaacagtgcctatcctatcaagtagatattttctgaatacgtagataattgtagaatacaagaaaagaaatatcctctgtggaataaatgaataatatacttttgtcagaaacgttacaagttaaaattccacgactgattgccacgtgtaagcttatctcaaaagggccctacagtaccatgatgacgtcatctcttacaccactctctgaaaaattcctccgccttataaaaaaactcgattatcgtcttcacttagtcacccagctttcttgtacaaagtggttgataacagcgcttagagctctgccgagcacaattgatcggctaaatggtatggcaagaaaaggtatgcaatataataatcttttattgggtatgcaacgaaaatttgtttcgtcaacgtatgcaatattttttattaaaagagggtatgcaatgtattttattaaaaacgggtatgcaatataataatcttttattgggtatgcaacgaaaatttgtttcgtcaaagtatgcaatattttttattaaaagagggtatgcaatgtattttattaaaaacgggtatgcaataaaaaattatttggtttctctaaaaagtatgcagcacttattttttgataaggtatgcaacaaaattttactttgccgaaaatatgcaatgtttttgcgaataaattcaacgcacacttattacgtgggcgcgccttaattaaattaatggtaccggtcctcagagagcctatagcggtaaaacaacaccatgcatcccccctgcaggcacgtaataagtgtgcgttgaatttattcgcaaaaacattgcatattttcggcaaagtaaaattttgttgcataccttatcaaaaaataagtgctgcatactttttagagaaaccaaataattttttattgcatacccgtttttaataaaatacattgcataccctcttttaataaaaaatattgcatactttgacgaaacaaattttcgttgcatacccaataaaagattattatattgcatacccgtttttaataaaatacattgcataccctcttttaataaaaaatattgcatacgttgacgaaacaaattttcgttgcatacccaataaaagattattatattgcataccttttcttgccataccatttagccgatcaattgtgctcggcatctagagttatcaacaagtttgtacaaaaaagcaggcttagaacagataagtgaagtttctctgcgatttttctaatgttgaatccatcaaactaataagtggtccctaaacctacatagtcgatggtaaaatgtcaataatgtttgaaagtttagataataccctgaaaatgacgagtcccttcgtttacttgtaataatgggtgagaactacgacacagttccatagcaactttcatatttcgagaattaaattatattccgcagcaaatgctatgtccttgtaaagctctgtttttagtctatgaccatacttgtaaaacatgttgtttttttttgtgtgaattaacagttcattcaaaataaaaataaataaataaataatcgaaaatgtaactctgtggttattgtagcttgaaaaaacgaataatcaagtgtgttgttcattctcttcgttcgttgcacactggtatagcttgttgctgtcatctactgctgactccagcgataatgaaacgatcagaaccacgaaatttactagaactcagcttatcggaacttggaaggggaccagatgagtattaggctaattcgtcgtgttgtatttttcaactaatgcgtcagtgtcgtttttattttcaactaatgcgtcagtgtcattagtttcggaaataaacgatatttgttttgtttttgtattgggtcctatatcgagcgagattggcatgtgagttgggttggctagggaaaatggtaaaatctccacattttgttttgaaaatgtgaaaaatacatttttccctacagcggggatatgaatcagtactatttataatgcaagatatgtaaatttaaaagacatcataagaaaaacaaaactacagaatttcgcttaagctttcaaagatatcgatttgaatataatggtgcatttgcggggttcagtttccacggaaccggtaaatttaaaagccaaataccttaaaagagttgtgaaacagggttacaaatatacatagtggattcgtatgaaaaagaagggaggaatgagtcctacacgtagtcacatcacatatgaaagagattgcttttgaaaatcgaatcctcttctaatattaaatctttcaagactggaggttttaaacaagaaaatcaaactcgacaactttgtatacaaaagttgtaatggcgtcagctttcaaggggatcttgatcagatctccacctgatgtctgtgcagagacagtagcaaaagtgagccaatgcaatcgagctcaacttgttaagaattcgtccactggttttaaaaatatcttcaaattatcagaggccaggaaatttcacgctccagttgcaagtcatttgaggtcacaagccgtcatggccccagcctcagacccaacatcaactgcaataaagagagtattcacctttggtaaaggaaggagtgaaggcaacaagggtatgaagtccttgttgggaggtaaaggagcaaaccttgcagagatggccagcataggcttatccgtcccacctggattgactatttctacagaagcatgccaagagtaccaggagcatggaaaacagctctctgctggtttgtgggaggagatattggagggattgagagtcatagagaaggatatggggtcttaccttggagacccttctaagcctcttctgctttcagttcgttctggtgctgcgatttccatgccagggatgatggacactgtcctcaatctaggacttaatgacgatgtggttgcaggactggcagcaaaaagtggagaacgctttgcttacgactcatacagacgtttcctggacatgtttggtaatgtagtcatgggtatttctcactcatcatttgaagagaagttagaaaagttgaagcaggcaaaaggtgttaaacttgatacggagctaactgcatctgatctaaaagaggtagtagaacagtacaagaacgtctatcttgaagtaaaaggagaaaagtttcctgctgatccagaaagacagcttcagcttgctattcaagcagtatttgattcatgggatagtccaagggccatcaagtatcggaacattaaccagataacaggactgaaagggactgcagttaatatccagtgtatggtgtttggtaacatgggaaatacttcagggactggtgttcttttcactcgaaacccaagcactggtgaaaagaagctctatggggaattcctgattaatgctcagggagaagatgtagttgccggcattagaacgccagaagacttggacaccatgaggagctgcatgcctgaagcttacaaggagcttgtggagaactgtgaaattctggaacgacattacaaggatatgatggatattgaattcactgttcaagaaaataggctatggatgttgcaatgccgatctggtaaacgaactggtaaaggtgctgtgaagatagctgtagacttggtgaaagaaggaatagtcgacacttacactgctattaagatggtggaaccacagcatcttgatcaacttcttcacccacagtttgaagacccatctgcttataaagacagagtgattgctactggcctgccggcatctcctggagctgctgttgggcagattattttcagtgctgatgaagctgaatcatggcaagcacaaggaaagagtgtcattctggtgaggaatgaaactagcccagaggatgttgggggtatgcatgcagcaattggaatcttaactgctaggggtggcatgacatctcatgcagctgttgtagcccgtgggtggggaaaatgttgtgtttcagggtgctctgaaatccgagtgaatgatacagacaaggttcttttggttggagacaaagtaatatcagaaggtgattggctttcacttaatggatctactggtgaagttatcttagggaaagtaccactttcacctcctgctctcagtggggatctagaaaccttcatgtcttgggcggatgatatacgtgtccttaaggtcatggcaaatgctgacacaccagaggatgctttggcagcaagaaacaatggtgctgaaggaattggactttgcaggacagagcacatgttttttgcttcagatgataggattaagacagtgaggaagatgataatggcagtaacatccgaacagagaaaagtggctctggaccagctattgccttatcaaagatccgacttcgaagggatttttcgggcaatggatggtcttccagtgacaattagattgttggaccctccactacatgagttccttcctgaaggtgatgtagaacaaattgtcagtgaacttaccttggagactggcatggctgaagatgaaatcttttccaggattgaaaagttgtcagaggtcaatcctatgttgggtttcagaggctgcaggttggggatatcatacccagaactaactgaaatgcaagcacgggcaatcttccaagctgctgtttcaatgagcaaccagggtgttaaagtttttcctgagataatggttccccttgtaggaacgcctcaggaattaggacatcaagtgagcttgatacggaatgttgcagaaaaggtattctctgagacgggttcctccttgagttacaaggtgggaacaatgattgagatccctagggcggctctggttgcagatgagattgcaatggaagcagaattcttctcttttgggacgaatgatctcacgcaaatgacctttgggtatagcagagatgatgttggcaagttcctccctgtatacttgtccaagggcatacttcagagtgatccatttgaggttttggaccagaaaggtgtgggccaactcatcaaactagcaacggagaagggccgtagtgcaaggcctagcttaaaggttggcatatgtggggagcatggaggagaaccgtcatctgttgcatttttcgcggaagcaggattggactacgtttcatgttcccctttcagggttccaattgcaaggctggcagcagctcaagtcgttaacccaacttttctatacaaagttgtaatgtcttggaaagatgcttctggatggtcttgaacaactttgtataataaagttgtaaattgggctaatgattaacatgaatatttttcataagtctaaaaatatgttattctctctctttcaaaatacattgaatttggtattagttacttttatttatttaagtttggtgttaactttagtactttaagccagaattttctttgaaaatctaaacgaccttattttgagaattctttaagaaagtaagtcttgaaacaattcgaacaagcttaagcttagtttcagcttcttattcttccttagtaatttctcttgatcccgtggcaagtagatttattcctttattgtacgtattgatgatgcctcgatcacttagatgagtccttgttaaagggaaccaaacttcaaatccgactatcattttcttattttctggacaaaaagtctaaactcatatattacagatgtttaaaattttgaatagttttgtctttaacgaggagctacactagtaatggaagcttcgtcgattgaaaagaggtcagatgtatccacacccagctttcttgtacaaagtggttgataacagcgcttagagctctgccgagcacaattgatcggctaaatggtatggcaagaaaaggtatgcaatataataatcttttattgggtatgcaacgaaaatttgtttcgtcaacgtatgcaatattttttattaaaagagggtatgcaatgtattttattaaaaacgggtatgcaatataataatcttttattgggtatgcaacgaaaatttgtttcgtcaaagtatgcaatattttttattaaaagagggtatgcaatgtattttattaaaaacgggtatgcaataaaaaattatttggtttctctaaaaagtatgcagcacttattttttgataaggtatgcaacaaaattttactttgccgaaaatatgcaatgtttttgcgaataaattcaacgcacacttattacgtgggcgcgccttaattaaattaatggtaccggtcgcagtcgcttcctgtaaatagagcattaaattccatagtcccctgcaggcacgtaataagtgtgcgttgaatttattcgcaaaaacattgcatattttcggcaaagtaaaattttgttgcataccttatcaaaaaataagtgctgcatactttttagagaaaccaaataattttttattgcatacccgtttttaataaaatacattgcataccctcttttaataaaaaatattgcatactttgacgaaacaaattttcgttgcatacccaataaaagattattatattgcatacccgtttttaataaaatacattgcataccctcttttaataaaaaatattgcatacgttgacgaaacaaattttcgttgcatacccaataaaagattattatattgcataccttttcttgccataccatttagccgatcaattgtgctcggcatctagagttatcaacaagtttgtacaaaaaagcaggcttattttaaatatctgtattttgcctccttttcattctattttgtttgatacaaacgattgtggtttgtaatgttaaaattaggaatgttattgaatgatatgtatatttcataaaaataataataataaaagtaggatgaatagtaaaattccaaggcatttcataatttacccattacatggtcaaaatttatcaatattttaaaataataataatcatccaatcaagattttgggaatagaatatcttaagaacttagtataattacatatatatatatatattcccttttaaatgtatcaaaaacaaactaagaacatacaaggaatttgatgtagtactatacaatttacatgcaaacagatgtagtactatttgatgacaaaaaaaaaaaaaaagatgtagtactattttatcttttcatcggaataattcggtcatgaagctattaattggttttaatgagaatttattataacagttgttgccacactgtcgaaatactaacgcctaacggctagttaaataattaacacgcggtgagaagtgagtgagttacacgaaccactaagaatctaatataggaagataagataagcatttcacacgtgtggtgtggacaatttaacagtgttaacacgcgcatggcatgtgatctagaaattagaacattaattttagcgttttgactttgacctttgaatcactaggcgtaggtatttacacgtgtaacaatataatttttttcaatatgtgatgatcatgggccaacgtttgtgggtaaaggtgtggtgttcgatcatgatccacttaaatttactgaattttagaattataacagcagaaggatataagtaatataccaaacttaactataatctacctctccttgtctatgtatactaaatgtctaacatgtaacacaaagctgtacaaaatttttaactctcaaattttttgaaataatgcaaagctgtaaaaatagctgtacgagaaaactgtacaataaaactgaaaataaaaaaatttgtaacgtttttgataaaagttttgtaaatgtataaccatcaaaactgtacaacttccagctttgataatgaattaccattcaaagctagagtttcgaattttttcattgtatacaaccatttgaacacaactcttttcaattatgccatacatacatttagttaataaattttaccgattaactagtactgacaaaagaaacaaagagtaattatatttttttgataaattgttttattagaaaaatacttaaaattgataaaaataaataaacccaattgatatatttgatattacaataccagatattgaaacaaataagacatgttttgtctatatacttccaactagaagatatttatttatccatatcctagatattttaatgtgtgaatctaatacattctcttatatacgaccaaatagtaaaacaatatgcctctcctgcaatttttcttcatccaatatttctacaactttgtatacaaaagttgtaatgttagcttgtgctagcctcggcctcccaaaaacccaaccgccaccgccactagtttcaccggcacctgaaccaagccgtccggccccagccccatccgtttctctctcctctgactcagcaacctcacttcctcaggcccaaccccaggcccgaaaattaaagggcagctcaaagctgaacctctggtcaagaaatcgggccatacggtccggccggaaactgaaccggccggctaaaaatacggcccaggccgccgttgaaattgcgaattatcctcgaaccagggtcgatgggtccgattctgacggagaagatgacggcgatattcgagaggggaaggcgatatacatggtgtctgacggaactgggtggacggcggaacacgccgttacggcagctttgggtcagttcgattattgcttggtcgatcatggttgccctgttaatacccatttgttttctgggatagatgatgtagagcgtctgatggaaattgtgaaacaagcagcaaaagaaggtgctatgcttgtctatacgcttgctgattcatcaatggctgaatctgccaaaaaagcctgcaaactgtggggtgttccatcaaccgatgttctgggcccaataacggagtcaattgcttctcatcttggcgcctcaccttcaggactccctcgtggtgctggaggtgtaaatgttcccctaagtgaagactatttccgaagaattgaagccatagagtttaccatcaagcaagatgatggggctcttcctcagaacttgcataaggctgaacttgtactcactggtgtatctcgaactggaaaaactccactatcaatttacctggcacaaaaaggatacaaagtggcaaatgttccaatcgtaatgggtgtggatttaccaaaaactctgtttgagatagaccctgataaggtttttggtttgactataaatccggtaatcttgcaatcaattaggaagtcacgagccaagagcctgggattagctgaagatgagacgactagctattctgaaatggactatgtgagaggcgagttggtgaacgcgactaaaatcttctcacaaaatcctaagtggcgggtcgttgaggtgactagtaaagccattgaagaatctgcagcagttatcttgaggctgtaccatgacagaaagcagaagtgtttgatgcccagaatatctaagcgctataacccaacttttctatacaaagttgtaatggatacttatagatatatttgaacaactttgtataataaagttgtaaaccgaatatctcttcgaatcacattcatatatatagagtcttgagagtatacacacttgaaaccgtttgtacatacatatacataccattgtgctatgttactcccaggttttgataccttagttttttttacctgcaaatcgatcaaaacccgattttctttgcggagttaccacccagctttcttgtacaaagtggttgataacagcgcttagagctctgccgagcacaattgatcggctaaatggtatggcaagaaaaggtatgcaatataataatcttttattgggtatgcaacgaaaatttgtttcgtcaacgtatgcaatattttttattaaaagagggtatgcaatgtattttattaaaaacgggtatgcaatataataatcttttattgggtatgcaacgaaaatttgtttcgtcaaagtatgcaatattttttattaaaagagggtatgcaatgtattttattaaaaacgggtatgcaataaaaaattatttggtttctctaaaaagtatgcagcacttattttttgataaggtatgcaacaaaattttactttgccgaaaatatgcaatgtttttgcgaataaattcaacgcacacttattacgtgggcgcgccttaattaaattaatggtaccggtacttaatcgaaaaaaaaacagacagccatgtgctcttcggccttaattaaggtgcgtttttatgcttgtagtattgtataatgtttttaagatcctagggataacagggtaatgagctcggatccactagtctcacaattccacacaacatacgagccggaagcataaagtgtaaagcctggggtgcctaatgagtgagctaactcacattaggctgaattaggcgcgcctatttctattaattcccgatctagtaacatagatgacaccgcgcgcgataatttatcctagtttgcgcgctatattttgttttctatcgcgtattaaatgtataattgcgggactctaatcataaaaacccatctcataaataacgtcatgcattacatgttaattattacatgcttaacgtaattcaacagaaattatatgataatcatcgcaagaccggcaacaggattcaatcttaagaaactttattgccaaatgtttgaacgatcggggaaattcgggggatcgatcccgcgaactgtggacgagaactgtgccaccaagcgtaaggccgttctctcgcatttgccttgctaggctcgcgcgagttgctggctgaggcgttctcgaaatcagctcttgttcggtcggcatctactctattcctttgccctcggacgagtgctggggcgtcggtttccactatcggcgagtacttctacacagccatcggtccagacggccgcgcttctgcgggcgatttgtgtacgcccgacagtcccggctccggatcggacgattgcgtcgcatcgaccctgcgcccaagctgcatcatcgaaattgccgtcaaccaagctctgatagagttggtcaagaccaatgcggagcatatacgcccggagccgcggcgatcctgcaagctccggatgcctccgctcgaagtagcgcgtctgctgctccatacaagccaaccacggcctccagaagaagatgttggcgacctcgtattgggaatccccgaacatcgcctcgctccagtcaatgaccgctgttatgcggccattgtccgtcaggacattgttggagccgaaatccgcgtgcacgaggtgccggacttcggggcagtcctcggcccaaagcatcagctcatcgagagcctgcgcgacggacgcactgacggtgtcgtccatcacagtttgccagtgatacacatggggatcagcaatcgcgcatatgaaatcacgccatgtagtgtattgaccgattccttgcggtccgaatgggccgaacccgctcgtctggctaagatcggccgcagcgatcgcatccatggcctccgcgaccggctgcagaacagcgggcagttcggtttcaggcaggtcttgcaacgtgacaccctgtgcacggcgggagatgcaataggtcaggctctcgctgaatgccccaatgtcaagcacttccggaatcgggagcgcggccgatgcaaagtgccgataaacataacgatctttgtagaaaccatcggcgcagctatttacccgcaggacatatccacgccctcctacatcgaagctgaaagcacgagattcttcgccctccgagagctgcatcaggtcggagacgctgtcgaacttttcgatcagaaacttctcgacagacgtcgcggtgagttcaggctttttcatatcttattgccccccgggatcagatctggattgagagtgaatatgagactctaattggataccgaggggaatttatggaacgtcagtggagcatttttgacaagaaatatttgctagctgatagtgaccttaggcgacttttgaacgcgcaataatggtttctgacgtatgtgcttagctcattaaactccagaaacccgcggctgagtggctccttcaacgttgcggttctgtcagttccaaacgtaaaacggcttgtcccgcgtcatcggcgggggtcataacgtgactcccttaattctccgctcatgatcttgatcccctgcgccatcagatccttggcggcaagaaagccatccagtttactttgcagggcttcccaaccttaccagagggcgccccagctggcaattccggttcgcttgctgtccataaaaccgcccagtctagctatcgccatgtaagcccactgcaagctacctgctttctctttgcgcttgcgttttcccttgtccagatagcccagtagctgacattcatccggggtcagcaccgtttctgcggactggctttctacgtgttccgcttcctttagcagcccttgcgccctgagtgcttgcggcagcgtgaagctgatccgtcgagattaatagaaataaattcagcctaattcggcgttaattcagtacattaaaaacgtccgcaatgtggcggccgcggtatcactagtattacagaggtaagttataacagtcgcctaaccgaattcagaaataaattcagcctaattcggcgttaattcagtacattaaaaacgtccgcaatgtgttattaagttgtctaagcgtcaatttgtttacaccacaatatatcctgccaccagccagccaacagctccccgaccggcagctcggcacaaaatcaccactcgatacaggcagcccatcagtccgggacggcgtcagcgggagagccgttgtaaggcggcagactttgctcatgttaccgatgctattcggaagaacggcaactaagctgccgggtttgaaacacggatgatctcgcggagggtagcatgttgattgtaacgatgacagagcgttgctgcctgtgatcaattcgggcacgaacccagtggacataagcctgttcggttcgtaagctgtaatgcaagtagcgtatgcgctcacgcaactggtccagaaccttgaccgaacgcagcggtggtaacggcgcagtggcggttttcatggcttgttatgactgtttttttggggtacagtctatgcctcgggcatccaagcagcaagcgcgttacgccgtgggtcgatgtttgatgttatggagcagcaacgatgttacgcagcagggcagtcgccctaaaacaaagttaaacatcatgggggaagcggtgatcgccgaagtatcgactcaactatcagaggtagttggcgtcatcgagcgccatctcgaaccgacgttgctggccgtacatttgtacggctccgcagtggatggcggcctgaagccacacagtgatattgatttgctggttacggtgaccgtaaggcttgatgaaacaacgcggcgagctttgatcaacgaccttttggaaacttcggcttcccctggagagagcgagattctccgcgctgtagaagtcaccattgttgtgcacgacgacatcattccgtggcgttatccagctaagcgcgaactgcaatttggagaatggcagcgcaatgacattcttgcaggtatcttcgagccagccacgatcgacattgatctggctatcttgctgacaaaagcaagagaacatagcgttgccttggtaggtccagcggcggaggaactctttgatccggttcctgaacaggatctatttgaggcgctaaatgaaaccttaacgctatggaactcgccgcccgactgggctggcgatgagcgaaatgtagtgcttacgttgtcccgcatttggtacagcgcagtaaccggcaaaatcgcgccgaaggatgtcgctgccgactgggcaatggagcgcctgccggcccagtatcagcccgtcatacttgaagctagacaggcttatcttggacaagaagaagatcgcttggcctcgcgcgcagatcagttggaagaatttgtccactacgtgaaaggcgagatcaccaaggtagtcggcaaataatgtctagctagaaattcgttcaagccgacgccgcttcgcggcgcggcttaactcaagcgttagatgcactaagcacataattgctcacagccaaactatcaggtcaagtctgcttttattatttttaagcgtgcataataagccctacacaaattgggagatatatcatgcatgaccaaaatcccttaacgtgagttttcgttccactgagcgtcagaccccgtagaaaagatcaaaggatcttcttgagatcctttttttctgcgcgtaatctgctgcttgcaaacaaaaaaaccaccgctaccagcggtggtttgtttgccggatcaagagctaccaactctttttccgaaggtaactggcttcagcagagcgcagataccaaatactgtccttctagtgtagccgtagttaggccaccacttcaagaactctgtagcaccgcctacatacctcgctctgctaatcctgttaccagtggctgctgccagtggcgataagtcgtgtcttaccgggttggactcaagacgatagttaccggataaggcgcagcggtcgggctgaacggggggttcgtgcacacagcccagcttggagcgaacgacctacaccgaactgagatacctacagcgtgagctatgagaaagcgccacgcttcccgaagggagaaaggcggacaggtatccggtaagcggcagggtcggaacaggagagcgcacgagggagcttccagggggaaacgcctggtatctttatagtcctgtcgggtttcgccacctctgacttgagcgtcgatttttgtgatgctcgtcaggggggcggagcctatggaaaaacgccagcaacgcggcctttttacggttcctggccttttgctggccttttgctcacatgttctttcctgcgttatcccctgattctgtggataaccgtattaccgcctttgagtgagctgataccgctcgccgcagccgaacgaccgagcgcagcgagtcagtgagcgaggaagcggaagagcgcctgatgcggtattttctccttacgcatctgtgcggtatttcacaccgcatatggtgcactctcagtacaatctgctctgatgccgcatagttaagccagtatacactccgctatcgctacgtgactgggtcatggctgcgccccgacacccgccaacacccgctgacgcgccctgacgggcttgtctgctcccggcatccgcttacagacaagctgtgaccgtctccgggagctgcatgtgtcagaggttttcaccgtcatcaccgaaacgcgcgaggcagggtgccttgatgtgggcgccggcggtcgagtggcgacggcgcggcttgtccgcgccctggtagattgcctggccgtaggccagccatttttgagcggccagcggccgcgataggccgacgcgaagcggcggggcgtagggagcgcagcgaccgaagggtaggcgctttttgcagctcttcggctgtgcgctggccagacagttatgcacaggccaggcgggttttaagagttttaataagttttaaagagttttaggcggaaaaatcgccttttttctcttttatatcagtcacttacatgtgtgaccggttcccaatgtacggctttgggttcccaatgtacgggttccggttcccaatgtacggctttgggttcccaatgtacgtgctatccacaggaaagagaccttttcgacctttttcccctgctagggcaatttgccctagcatctgctccgtacattaggaaccggcggatgcttcgccctcgatcaggttgcggtagcgcatgactaggatcgggccagcctgccccgcctcctccttcaaatcgtactccggcaggtcatttgacccgatcagcttgcgcacggtgaaacagaacttcttgaactctccggcgctgccactgcgttcgtagatcgtcttgaacaaccatctggcttctgccttgcctgcggcgcggcgtgccaggcggtagagaaaacggccgatgccgggatcgatcaaaaagtaatcggggtgaaccgtcagcacgtccgggttcttgccttctgtgatctcgcggtacatccaatcagctagctcgatctcgatgtactccggccgcccggtttcgctctttacgatcttgtagcggctaatcaaggcttcaccctcggataccgtcaccaggcggccgttcttggccttcttcgtacgctgcatggcaacgtgcgtggtgtttaaccgaatgcaggtttctaccaggtcgtctttctgctttccgccatcggctcgccggcagaacttgagtacgtccgcaacgtgtggacggaacacgcggccgggcttgtctcccttcccttcccggtatcggttcatggattcggttagatgggaaaccgccatcagtaccaggtcgtaatcccacacactggccatgccggccggccctgcggaaacctctacgtgcccgtctggaagctcgtagcggatcacctcgccagctcgtcggtcacgcttcgacagacggaaaacggccacgtccatgatgctgcgactatcgcgggtgcccacgtcatagagcatcggaacgaaaaaatctggttgctcgtcgcccttgggcggcttcctaatcgacggcgcaccggctgccggcggttgccgggattctttgcggattcgatcagcggccgcttgccacgattcaccggggcgtgcttctgcctcgatgcgttgccgctgggcggcctgcgcggccttcaacttctccaccaggtcatcacccagcgccgcgccgatttgtaccgggccggatggtttgcgaccgctcacgccgattcctcgggcttgggggttccagtgccattgcagggccggcagacaacccagccgcttacgcctggccaaccgcccgttcctccacacatggggcattccacggcgtcggtgcctggttgttcttgattttccatgccgcctcctttagccgctaaaattcatctactcatttattcatttgctcatttactctggtagctgcgcgatgtattcagatagcagctcggtaatggtcttgccttggcgtaccgcgtacatcttcagcttggtgtgatcctccgccggcaactgaaagttgacccgcttcatggctggcgtgtctgccaggctggccaacgttgcagccttgctgctgcgtgcgctcggacggccggcacttagcgtgtttgtgcttttgctcattttctctttacctcattaactcaaatgagttttgatttaatttcagcggccagcgcctggacctcgcgggcagcgtcgccctcgggttctgattcaagaacggttgtgccggcggcggcagtgcctgggtagctcacgcgctgcgtgatacgggactcaagaatgggcagctcgtacccggccagcgcctcggcaacctcaccgccgatgcgcgtgcctttgatcgcccgcgacacgacaaaggccgcttgtagccttccatccgtgacctcaatgcgctgcttaaccagctccaccaggtcggcggtggcccatatgtcgtaagggcttggctgcaccggaatcagcacgaagtcggctgccttgatcgcggacacagccaagtccgccgcctggggcgctccgtcgatcactacgaagtcgcgccggccgatggccttcacgtcgcggtcaatcgtcgggcggtcgatgccgacaacggttagcggttgatcttcccgcacggccgcccaatcgcgggcactgccctggggatcggaatcgactaacagaacatcggccccggcgagttgcagggcgcgggctagatgggttgcgatggtcgtcttgcctgacccgcctttctggttaagtacagcgataaccttcatgcgttccccttgcgtatttgtttatttactcatcgcatcatatacgcagcgaccgcatgacgcaagctgttttactcaaatacacatcacctttttagacggcggcgctcggtttcttcagcggccaagctggccggccaggccgccagcttggcatcagacaaaccggccaggatttcatgcagccgcacggttgagacgtgcgcgggcggctcgaacacgtacccggccgcgatcatctccgcctcgatctcttcggtaatgaaaaacggttcgtcctggccgtcctggtgcggtttcatgcttgttcctcttggcgttcattctcggcggccgccagggcgtcggcctcggtcaatgcgtcctcacggaaggcaccgcgccgcctggcctcggtgggcgtcacttcctcgctgcgctcaagtgcgcggtacagggtcgagcgatgcacgccaagcagtgcagccgcctctttcacggtgcggccttcctggtcgatcagctcgcgggcgtgcgcgatctgtgccggggtgagggtagggcgggggccaaacttcacgcctcgggccttggcggcctcgcgcccgctccgggtgcggtcgatgattagggaacgctcgaactcggcaatgccggcgaacacggtcaacaccatgcggccggccggcgtggtggtgtcggcccacggctctgccaggctacgcaggcccgcgccggcctcctggatgcgctcggcaatgtccagtaggtcgcgggtgctgcgggccaggcggtctagcctggtcactgtcacaacgtcgccagggcgtaggtggtcaagcatcctggccagctccgggcggtcgcgcctggtgccggtgatcttctcggaaaacagcttggtgcagccggccgcgtgcagttcggcccgttggttggtcaagtcctggtcgtcggtgctgacgcgggcatagcccagcaggccagcggcggcgctcttgttcatggcgtaatgtctccggttctagtcgcaagtattctactttatgcgactaaaacacgcgacaagaaaacgccaggaaaagggcagggcggcagcctgtcgcgtaacttaggacttgtgcgacatgtcgttttcagaagacggctgcactgaacgtcagaagccgactgcactatagcagcggaggggttggatcaaagtactttgatcccgaggggaaccctgtggttggcatgcacatacaaatggacgaacggataaaccttttcacgcccttttaaatatccgattattctaataaacgctcttttctcttag

SEQ ID NO: 70 - DNA, 3432 bp, Artificial Sequence
  Synthetic oligonucleotide sequence
ctggcagttccctactctcgcgttaacgctagcatggatgttttcccagtcacgacgttgtaaaacgacggccagtcttaagctcgggccccaaataatgattttattttgactgatagtgacctgttcgttgcaacaaattgatgagcaatgcttttttataatgccaactttgtacaaaaaagcaggctccgcggccgcccccttcaccatgacaggaggctttaggaaatgcatggtgctttgttgtgcaagaaaactcccgaaagaaacaacaatgggaaccaccgcatacgacgaagccattacagggctgagcaagcttctcagtgagaagaaaggattggatgatgtagcagccgcaaaaatcaagcagttaacagcagagttgcagcagggcaccaagcaaaatggtgtttccgaaaacgggtttgacccggatgagcgcatcaaatccggattcatccggttcaagactgagaaatatgagaagaatcctgctctgtacggtgaacttgccaagggccagagtcccaagttcttggtatttgcctgctcagactcccgtgtttgcccctcccacatcttggatttcaagccaggggatgccttctcggttcgtaacatcgccaacatggtcccaccttttgataagacaaagttctctgggacaggggcagccattgagtatgctgtattgcatctaaatgtggagaatattgtggtcattggacacagctgctgtggaggaataaaggggctcatgtccatccctgattgtggcaccacttccacagacttcattgaagagtgggtcaagatcgctcagcctgctaggaccaaggtcaaagcagaagttagtagcgcagagttcacggagcagtgcaagaactgcgagaaggaagctgtcaatgtctctctcggaaacttgttgacatacccatttgtgagggaagcagtaatgaagaaaactctggcattgaagggtgcacattatgattttgtcaatggacgtttcgagctgtggaacctcgaatttggcctctcaccttctaccgcagtaaagggtgggcgcgccgacccagctttcttgtacaaagttggcattataagaaagcattgcttatcaatttgttgcaacgaacaggtcactatcagtcaaaataaaatcattatttgccatccagctgatatcccctatagtgagtcgtattacatggtcatagctgtttcctggcagctctggcccgtgtctcaaaatctctgatgttacattgcacaagataaaaatatatcatcatgaacaataaaactgtctgcttacataaacagtaatacaaggggtgttatgagccatattcaacgggaaacgtcgaggccgcgattaaattccaacatggatgctgatttatatgggtataaatgggctcgcgataatgtcgggcaatcaggtgcgacaatctatcgcttgtatgggaagcccgatgcgccagagttgtttctgaaacatggcaaaggtagcgttgccaatgatgttacagatgagatggtcagactaaactggctgacggaatttatgcctcttccgaccatcaagcattttatccgtactcctgatgatgcatggttactcaccactgcgatccccggaaaaacagcattccaggtattagaagaatatcctgattcaggtgaaaatattgttgatgcgctggcagtgttcctgcgccggttgcattcgattcctgtttgtaattgtccttttaacagcgatcgcgtatttcgtctcgctcaggcgcaatcacgaatgaataacggtttggttgatgcgagtgattttgatgacgagcgtaatggctggcctgttgaacaagtctggaaagaaatgcataaacttttgccattctcaccggattcagtcgtcactcatggtgatttctcacttgataaccttatttttgacgaggggaaattaataggttgtattgatgttggacgagtcggaatcgcagaccgataccaggatcttgccatcctatggaactgcctcggtgagttttctccttcattacagaaacggctttttcaaaaatatggtattgataatcctgatatgaataaattgcagtttcatttgatgctcgatgagtttttctaatcagaattggttaattggttgtaacactggcagagcattacgctgacttgacgggacggcgcaagctcatgaccaaaatcccttaacgtgagttacgcgtcgttccactgagcgtcagaccccgtagaaaagatcaaaggatcttcttgagatcctttttttctgcgcgtaatctgctgcttgcaaacaaaaaaaccaccgctaccagcggtggtttgtttgccggatcaagagctaccaactctttttccgaaggtaactggcttcagcagagcgcagataccaaatactgtccttctagtgtagccgtagttaggccaccacttcaagaactctgtagcaccgcctacatacctcgctctgctaatcctgttaccagtggctgctgccagtggcgataagtcgtgtcttaccgggttggactcaagacgatagttaccggataaggcgcagcggtcgggctgaacggggggttcgtgcacacagcccagcttggagcgaacgacctacaccgaactgagatacctacagcgtgagcattgagaaagcgccacgcttcccgaagggagaaaggcggacaggtatccggtaagcggcagggtcggaacaggagagcgcacgagggagcttccagggggaaacgcctggtatctttatagtcctgtcgggtttcgccacctctgacttgagcgtcgatttttgtgatgctcgtcaggggggcggagcctatggaaaaacgccagcaacgcggcctttttacggttcctggccttttgctggccttttgctcacatgttctttcctgcgttatcccctgattctgtggataaccgtattaccgcctttgagtgagctgataccgctcgccgcagccgaacgaccgagcgcagcgagtcagtgagcgaggaagcggaagagcgcccaatacgcaaaccgcctctccccgcgcgttggccgattcattaatgcagctggcacgacaggtttcccgactggaaagcgggcagtgagcgcaacgcaattaatacgcgtaccgctagccaggaagagtttgtagaaacgcaaaaaggccatccgtcaggatggccttctgcttagtttgatgcctggcagtttatggcgggcgtcctgcccgccaccctccgggccgttgcttcacaacgttcaaatccgctcccggcggatttgtcctactcaggagagcgttcaccgacaaacaacagataaaacgaaaggcccagtcttccgactgagcctttcgttttatttgatgc

SEQ ID NO: 71 - DNA, 3417 bp, Artificial Sequence
  Synthetic oligonucleotide sequence
ctggcagttccctactctcgcgttaacgctagcatggatgttttcccagtcacgacgttgtaaaacgacggccagtcttaagctcgggccccaaataatgattttattttgactgatagtgacctgttcgttgcaacaaattgatgagcaatgcttttttataatgccaactttgtacaaaaaagcaggctccgcggccgcccccttcaccatgtgtgagagcttcaagagagaataccagctctgcgaggagatcggtcgaggccgcttcggcgtcgtctaccgctgctacaacccctcctccaccgaagattccgacactcctttggctgtcaagtccattgataagcgcctcctcctcgacgacgagaccgaccgtgagtgccttgacaaggaacccaaaatcctccaccttctctctcctcaccctaatattctgcagatccataacctctttgattctgatacccatctcctcattgttaccgatctctgccaagaggagaccctttacgaacgcattatctctaacggccccttctctgagcctgacgctgcggctattttctgtcagctcgccgaggccctcgctcactgccaccgcaactacgtcgctcaccgtgatatcaaaccagacaacatactattcgactcaaggaacaggctgaagctctgcgacttcggctcggccgagtggttcggagcaggagacagagagatgcgcggtgtggtaggaacaccctactacgtggcgccggaggtgctttccggaaaagactacaatgagaaggcggatgtgtggagtgctggtgttattctctacatcatgctcggtggagttccacccttctatggtgagactgttgaggagacttttgaggctgttcttaggggaaatcttcgctttccggccaggattttccgaaacgtttctactcaggcaagggatttgttgaggaagatgatgtgcaaggatgtttccagaaggttttctgctgaacaagtcttaaggcatccttgggtaaccagtggaggattggccaacatgaagggtgggcgcgccgacccagctttcttgtacaaagttggcattataagaaagcattgcttatcaatttgttgcaacgaacaggtcactatcagtcaaaataaaatcattatttgccatccagctgatatcccctatagtgagtcgtattacatggtcatagctgtttcctggcagctctggcccgtgtctcaaaatctctgatgttacattgcacaagataaaaatatatcatcatgaacaataaaactgtctgcttacataaacagtaatacaaggggtgttatgagccatattcaacgggaaacgtcgaggccgcgattaaattccaacatggatgctgatttatatgggtataaatgggctcgcgataatgtcgggcaatcaggtgcgacaatctatcgcttgtatgggaagcccgatgcgccagagttgtttctgaaacatggcaaaggtagcgttgccaatgatgttacagatgagatggtcagactaaactggctgacggaatttatgcctcttccgaccatcaagcattttatccgtactcctgatgatgcatggttactcaccactgcgatccccggaaaaacagcattccaggtattagaagaatatcctgattcaggtgaaaatattgttgatgcgctggcagtgttcctgcgccggttgcattcgattcctgtttgtaattgtccttttaacagcgatcgcgtatttcgtctcgctcaggcgcaatcacgaatgaataacggtttggttgatgcgagtgattttgatgacgagcgtaatggctggcctgttgaacaagtctggaaagaaatgcataaacttttgccattctcaccggattcagtcgtcactcatggtgatttctcacttgataaccttatttttgacgaggggaaattaataggttgtattgatgttggacgagtcggaatcgcagaccgataccaggatcttgccatcctatggaactgcctcggtgagttttctccttcattacagaaacggctttttcaaaaatatggtattgataatcctgatatgaataaattgcagtttcatttgatgctcgatgagtttttctaatcagaattggttaattggttgtaacactggcagagcattacgctgacttgacgggacggcgcaagctcatgaccaaaatcccttaacgtgagttacgcgtcgttccactgagcgtcagaccccgtagaaaagatcaaaggatcttcttgagatcctttttttctgcgcgtaatctgctgcttgcaaacaaaaaaaccaccgctaccagcggtggtttgtttgccggatcaagagctaccaactctttttccgaaggtaactggcttcagcagagcgcagataccaaatactgtccttctagtgtagccgtagttaggccaccacttcaagaactctgtagcaccgcctacatacctcgctctgctaatcctgttaccagtggctgctgccagtggcgataagtcgtgtcttaccgggttggactcaagacgatagttaccggataaggcgcagcggtcgggctgaacggggggttcgtgcacacagcccagcttggagcgaacgacctacaccgaactgagatacctacagcgtgagcattgagaaagcgccacgcttcccgaagggagaaaggcggacaggtatccggtaagcggcagggtcggaacaggagagcgcacgagggagcttccagggggaaacgcctggtatctttatagtcctgtcgggtttcgccacctctgacttgagcgtcgatttttgtgatgctcgtcaggggggcggagcctatggaaaaacgccagcaacgcggcctttttacggttcctggccttttgctggccttttgctcacatgttctttcctgcgttatcccctgattctgtggataaccgtattaccgcctttgagtgagctgataccgctcgccgcagccgaacgaccgagcgcagcgagtcagtgagcgaggaagcggaagagcgcccaatacgcaaaccgcctctccccgcgcgttggccgattcattaatgcagctggcacgacaggtttcccgactggaaagcgggcagtgagcgcaacgcaattaatacgcgtaccgctagccaggaagagtttgtagaaacgcaaaaaggccatccgtcaggatggccttctgcttagtttgatgcctggcagtttatggcgggcgtcctgcccgccaccctccgggccgttgcttcacaacgttcaaatccgctcccggcggatttgtcctactcaggagagcgttcaccgacaaacaacagataaaacgaaaggcccagtcttccgactgagcctttcgttttatttgatgc

SEQ ID NO: 72 - DNA, 5478 bp, Artificial Sequence
  Synthetic oligonucleotide sequence
ctggcagttccctactctcgcgttaacgctagcatggatgttttcccagtcacgacgttgtaaaacgacggccagtcttaagctcgggccccaaataatgattttattttgactgatagtgacctgttcgttgcaacaaattgatgagcaatgcttttttataatgccaactttgtacaaaaaagcaggctccgcggccgcccccttcaccatgtcgactgtgaagctagataggcttacgtcgattgatgcccaattgaggctgcttgcacctaagaaggtctctgaggatgataaacttattgagtatgatgctttgctgctcgatcgcttccttgatattcttcaaaacttacatggggaagacatcaaagaaacggttcaagaattgtatgaacaatctgctgaatatgaaaggacacatgaccccaagaaattggaggagctgggaagcatggtgaccagtttggatgctggagattccattgtggttgccaaatcattttctcacatgcttaacctggctaaccttgctgaagaagtccagatttcccgtcgcaagagggtcaaaaaagtgaagaaaggagattttatggatgagaatactgcgatgactgagtcagatatggaagaaacactgcggaggcttattgtggatttgaagaaatccccacaagaaatttttgaaactttgaaaaaccagacagttgacttagttttcacagctcatcctacacaatctgttcgtagatccttgcttcaaaaacatggaaggataagggattgtttggcccaattgtatgccaaagacattactcccgatgataagcaggagcttgatgaggctctgcaaagagagatacaagctgcatttcgtactgatgaaatcaggaggactcagccaactccacaggatgagatgagagctgggatgagctacttccatgagacaatttggaatggtgttccaaaatttttgcgacgtcttgacacggcattgaagaacataggaataactgagcgtgttccctataatgcccctcttattcagttctcatcttggatgggtggtgatcgagatggaaatccgagagtaacacctgaagttactagggatgtatgtttattggctagaatgatggctgctaatatgtatttctcccagatagacgagctcatgtttgagctctcaatgtggagatgcaccgatgaacttcgtgaacgagcagaggaacttcacaaatattcaaagagagactccaaacactacattgagttttggaaacaaattccttccagtgagccttatcgtgttattcttgctgacgtgagggataagctctactatacacgtgaacgttctcgtcagttgttggcaagtgaggtctctgaaatccccgtcgaagcaaccttcaccgaaattgatcagtttctggagcctcttgagctttgctacagatctctctgtgcttgtggtgataggccagttgcggatggaagtcttcttgatttcatgcgacaagtagctacctttgggctttgtcttgtaaagcttgatattaggcaagaatcagagaggcatactgatgtgatggatgccattactacgcacctgggcattgggtcctaccgagactggacagaagagaagaggcaggattggctcttatctgagcttaggggcaagcgccctttgtttggccctgatcttcccagaactgatgaaattgctgatgttttggacacaataaatgtaatcgcagaactcccatctgatagtttcggcgcttatgttatctcgatggctactgccccttctgatgtgcttgctgttgagcttctgcaacgtgaatgtaaagttaaaaagcctttgagggttgttccattgtttgagaaacttgctgacctggaggctgctcctgcttctatgacccgcctattctccgtagattggtataaaaataggattgatgggaagcaagaagtcatgatcggatactctgattctggtaaggatgctggtcgtctctcagccgcttggcaaatgtacaaggttcaggaagagctgcttaaggtttctaagaaatttggggtgaagctcacaatgtttcatggacgaggaggaacggtgggaagaggagggggtcctactcatcttgctattttggcacagccagctgaaactattggtggatcacttcgtgttacaattcaaggtgaagtgattgaacaatcctttggagagcagcacttgtgttttagaacactccagcgttatacagctgctacacttgaacatgggatgaatccaccaaaatctcctaagccagaatggcgtgctctcttggaccagatggctgttgttgccacagaggaataccgctccatagtttttaaggagcctcgatttgtcgagtacttccgtctcgcaacgccagaaacggagtatgggcgcatgaacattgggagcaggccatcaaagagaaagccaagtggtggaattgaatctctccgtgcaatcccttggatctttgcatggactcaaactaggttccatctgcctgtgtggctgggcgttggcggagcacttaaacatgtccttgagaaagatataaggaaccataacatgcttagggacatgtacaacaatttccctttcttcagggtgaccattgatttgcttgaaatggtgttcgctaagggagaccctgaaattgccgctttatatgacaaactactggtgtcagaggagctgcagtcctttggggagcgtttgagggcaaattatgaagacactaaacgccgtctcctcgaggtcgctgggcataaagacctgctagagggagatccttacttgaaacagaggctccgccttcgtgatccctacatcacaaccctcaatgtctgccaagcgtataccctgaagcggattcgtgatcccgacttcaaggtaacagagaggccacacttatccaaggaaatcatggacgcacacaaggcagctgctgagctggtgaagctaaaccccactagtgagtatgctcctggacttgaagacacacttatcttaaccatgaagggtgttgctgctggtctgcagaacactggtaagggtgggcgcgccgacccagctttcttgtacaaagttggcattataagaaagcattgcttatcaatttgttgcaacgaacaggtcactatcagtcaaaataaaatcattatttgccatccagctgatatcccctatagtgagtcgtattacatggtcatagctgtttcctggcagctctggcccgtgtctcaaaatctctgatgttacattgcacaagataaaaatatatcatcatgaacaataaaactgtctgcttacataaacagtaatacaaggggtgttatgagccatattcaacgggaaacgtcgaggccgcgattaaattccaacatggatgctgatttatatgggtataaatgggctcgcgataatgtcgggcaatcaggtgcgacaatctatcgcttgtatgggaagcccgatgcgccagagttgtttctgaaacatggcaaaggtagcgttgccaatgatgttacagatgagatggtcagactaaactggctgacggaatttatgcctcttccgaccatcaagcattttatccgtactcctgatgatgcatggttactcaccactgcgatccccggaaaaacagcattccaggtattagaagaatatcctgattcaggtgaaaatattgttgatgcgctggcagtgttcctgcgccggttgcattcgattcctgtttgtaattgtccttttaacagcgatcgcgtatttcgtctcgctcaggcgcaatcacgaatgaataacggtttggttgatgcgagtgattttgatgacgagcgtaatggctggcctgttgaacaagtctggaaagaaatgcataaacttttgccattctcaccggattcagtcgtcactcatggtgatttctcacttgataaccttatttttgacgaggggaaattaataggttgtattgatgttggacgagtcggaatcgcagaccgataccaggatcttgccatcctatggaactgcctcggtgagttttctccttcattacagaaacggctttttcaaaaatatggtattgataatcctgatatgaataaattgcagtttcatttgatgctcgatgagtttttctaatcagaattggttaattggttgtaacactggcagagcattacgctgacttgacgggacggcgcaagctcatgaccaaaatcccttaacgtgagttacgcgtcgttccactgagcgtcagaccccgtagaaaagatcaaaggatcttcttgagatcctttttttctgcgcgtaatctgctgcttgcaaacaaaaaaaccaccgctaccagcggtggtttgtttgccggatcaagagctaccaactctttttccgaaggtaactggcttcagcagagcgcagataccaaatactgtccttctagtgtagccgtagttaggccaccacttcaagaactctgtagcaccgcctacatacctcgctctgctaatcctgttaccagtggctgctgccagtggcgataagtcgtgtcttaccgggttggactcaagacgatagttaccggataaggcgcagcggtcgggctgaacggggggttcgtgcacacagcccagcttggagcgaacgacctacaccgaactgagatacctacagcgtgagcattgagaaagcgccacgcttcccgaagggagaaaggcggacaggtatccggtaagcggcagggtcggaacaggagagcgcacgagggagcttccagggggaaacgcctggtatctttatagtcctgtcgggtttcgccacctctgacttgagcgtcgatttttgtgatgctcgtcaggggggcggagcctatggaaaaacgccagcaacgcggcctttttacggttcctggccttttgctggccttttgctcacatgttctttcctgcgttatcccctgattctgtggataaccgtattaccgcctttgagtgagctgataccgctcgccgcagccgaacgaccgagcgcagcgagtcagtgagcgaggaagcggaagagcgcccaatacgcaaaccgcctctccccgcgcgttggccgattcattaatgcagctggcacgacaggtttcccgactggaaagcgggcagtgagcgcaacgcaattaatacgcgtaccgctagccaggaagagtttgtagaaacgcaaaaaggccatccgtcaggatggccttctgcttagtttgatgcctggcagtttatggcgggcgtcctgcccgccaccctccgggccgttgcttcacaacgttcaaatccgctcccggcggatttgtcctactcaggagagcgttcaccgacaaacaacagataaaacgaaaggcccagtcttccgactgagcctttcgttttatttgatgc

SEQ ID NO: 73 - DNA, 3576 bp, Artificial Sequence
  Synthetic oligonucleotide sequence
ctggcagttccctactctcgcgttaacgctagcatggatgttttcccagtcacgacgttgtaaaacgacggccagtcttaagctcgggccccaaataatgattttattttgactgatagtgacctgttcgttgcaacaaattgatgagcaatgcttttttataatgccaactttgtacaaaaaagcaggctccgcggccgcccccttcaccatggccgttgaacctcttcgcgttcttgtcaccggcgccgccgggcaaattgggtatgctctcgttcccatgattgctaggggaataatgctgggtgctaatcagcctgtgatcttgcacatgctcgatattcctccagcagccgaggcattgaacggagtgaaaatggagctggtggatgctgcctttccacttcttaaaggcgttgttgctacaaccgatgctgctgaagcctgcaaaggtgtaaatgttgctgtcatggttggtggcttcccaaggaaagaaggcatggagaggaaggatgtgatgtcaaagaatgtttccatctacaaggctcaagcttctgctcttgagcaacatgctgctcccaattgcaaggttttggttgttgccaaccctgccaacaccaatgctttgatcctaaaggaatttgccccatcaatcccggagaagaacatttcttgtttgacaaggcttgaccacaacagagctctaggtcagatctcagagagattgaatgttcaagtctctgatgttaagaatgtgattatttggggaaaccactcctcaactcaataccctgatgtcaaccacgctaccgtgaaaacacagggtgttgataagcctgttcgtgagcttgttgctgatgatgcatggttgaatggagagttcataacaactgtgcaacagcgtggagctgccatcatcaaggcaaggaagctctccagtgcattgtcagctgctagttctgcttgtgatcacatccatgattgggtgcttggaaccccagagggaacatgggtatctatgggtgtgtattctgatggctcgtacaatgtgccagctggaatcatttactccttcccagtaacttgtaaaaatggagaatggacaatcgtccaagggctgccaattgacgatgactcaaggaagaaaatggatgcaactgctgcagagcttgtcgaggagaagacattggcctactcatgcctgactaagggtgggcgcgccgacccagctttcttgtacaaagttggcattataagaaagcattgcttatcaatttgttgcaacgaacaggtcactatcagtcaaaataaaatcattatttgccatccagctgatatcccctatagtgagtcgtattacatggtcatagctgtttcctggcagctctggcccgtgtctcaaaatctctgatgttacattgcacaagataaaaatatatcatcatgaacaataaaactgtctgcttacataaacagtaatacaaggggtgttatgagccatattcaacgggaaacgtcgaggccgcgattaaattccaacatggatgctgatttatatgggtataaatgggctcgcgataatgtcgggcaatcaggtgcgacaatctatcgcttgtatgggaagcccgatgcgccagagttgtttctgaaacatggcaaaggtagcgttgccaatgatgttacagatgagatggtcagactaaactggctgacggaatttatgcctcttccgaccatcaagcattttatccgtactcctgatgatgcatggttactcaccactgcgatccccggaaaaacagcattccaggtattagaagaatatcctgattcaggtgaaaatattgttgatgcgctggcagtgttcctgcgccggttgcattcgattcctgtttgtaattgtccttttaacagcgatcgcgtatttcgtctcgctcaggcgcaatcacgaatgaataacggtttggttgatgcgagtgattttgatgacgagcgtaatggctggcctgttgaacaagtctggaaagaaatgcataaacttttgccattctcaccggattcagtcgtcactcatggtgatttctcacttgataaccttatttttgacgaggggaaattaataggttgtattgatgttggacgagtcggaatcgcagaccgataccaggatcttgccatcctatggaactgcctcggtgagttttctccttcattacagaaacggctttttcaaaaatatggtattgataatcctgatatgaataaattgcagtttcatttgatgctcgatgagtttttctaatcagaattggttaattggttgtaacactggcagagcattacgctgacttgacgggacggcgcaagctcatgaccaaaatcccttaacgtgagttacgcgtcgttccactgagcgtcagaccccgtagaaaagatcaaaggatcttcttgagatcctttttttctgcgcgtaatctgctgcttgcaaacaaaaaaaccaccgctaccagcggtggtttgtttgccggatcaagagctaccaactctttttccgaaggtaactggcttcagcagagcgcagataccaaatactgtccttctagtgtagccgtagttaggccaccacttcaagaactctgtagcaccgcctacatacctcgctctgctaatcctgttaccagtggctgctgccagtggcgataagtcgtgtcttaccgggttggactcaagacgatagttaccggataaggcgcagcggtcgggctgaacggggggttcgtgcacacagcccagcttggagcgaacgacctacaccgaactgagatacctacagcgtgagcattgagaaagcgccacgcttcccgaagggagaaaggcggacaggtatccggtaagcggcagggtcggaacaggagagcgcacgagggagcttccagggggaaacgcctggtatctttatagtcctgtcgggtttcgccacctctgacttgagcgtcgatttttgtgatgctcgtcaggggggcggagcctatggaaaaacgccagcaacgcggcctttttacggttcctggccttttgctggccttttgctcacatgttctttcctgcgttatcccctgattctgtggataaccgtattaccgcctttgagtgagctgataccgctcgccgcagccgaacgaccgagcgcagcgagtcagtgagcgaggaagcggaagagcgcccaatacgcaaaccgcctctccccgcgcgttggccgattcattaatgcagctggcacgacaggtttcccgactggaaagcgggcagtgagcgcaacgcaattaatacgcgtaccgctagccaggaagagtttgtagaaacgcaaaaaggccatccgtcaggatggccttctgcttagtttgatgcctggcagtttatggcgggcgtcctgcccgccaccctccgggccgttgcttcacaacgttcaaatccgctcccggcggatttgtcctactcaggagagcgttcaccgacaaacaacagataaaacgaaaggcccagtcttccgactgagcctttcgttttatttgatgc

SEQ ID NO: 74 - DNA, 4422 bp, Artificial Sequence
  Synthetic oligonucleotide sequence
ctggcagttccctactctcgcgttaacgctagcatggatgttttcccagtcacgacgttgtaaaacgacggccagtcttaagctcgggccccaaataatgattttattttgactgatagtgacctgttcgttgcaacaaattgatgagcaatgcttttttataatgccaactttgtacaaaaaagcaggctccgcggccgcccccttcaccatggcggggaaattcggatcactgaggcagagtttcattgaaagaagcaaagagaggttgctatctcgaagagggtattcggagctagggttacctggctccgatggtgatgttgaagatgagggcaatagcgatgtcaaatgcggttgtttccgatcaatttgcggcgggagaagtcgaaattccgatagcggaaatcgatctaagggcggatgttaccggtggatttgtgatcggatattagggttctgtaatgggtttaaggaagttgcaggtaaattttatgagatgggtcgatctgatcctcgaaaggtgttctttgcagcgaagatgggtgggagcttagctttggtttcaatgctcatcttcttgaggggacctttatcggatattcgtcagtatgctatttgggctattttaactgtcattgtctgtttcgagtacagcgtaggagcatgtcttagtaaaggccttaaccgtggtctgggaacggtaactgctggaagtattgctttcgggctagcagaattagcagttcggtctggtgaatacaaagaaccgctcattattatgtatatgttcttcgcaggttctattgcgacctacattaaattatacccaacaatgaaagaatacgaatatgggtttcgggtattccttatgacatttgccatagtaatggtgactggaaataaaacaacaaattttttccaaactgcttttttccggttgttgcttatttcaattggtgctgtcatagcttcagtggttaacatatgtgtttaccctatttggtctggcaccgatcttcataaggtggtggtgaaaaatttcaagggtgttgctacttctttggaaggctgtttaaatggatacttgcagtgtgtagcgtatgataaaatcccttcaaagattcttacgtaccaagcttatgatgaccctacatatggtggctatagaacagctgtccagtcagcaagtcaagaagaaactctgttgagctttgcgaaatgggagcctcctcatggcccttatagatcatgcaattatccttgggaatcctatgttaaagttagtggggcactgagacattgtgcttttatggttatggcaatgcatggatgcattcttgcagaaatacaggcaccaccagagaagagacaggtttttgccgatgaacttcgcagggttggcatggccggtgctaaagtcatacgtgaacttgggaacaaagttgagaaaatggagaaactaagccccggtgatatacttgcagaagtacatacggcagcagaggagctgcaaatgagaatcgatgagaagtcttatctcctggtcaatttcgagaaatgggaagaaggcaaacgaccaaaggaatttgatgaccctgagcgtgtttctcaaatgaagagttatggaagtggtcagcttgttataaactccctaagtgaagcagtgctaagtattgaacccgagcagatgcaatcatacattgataatatgagttcaagggtttcaatgattggtgctggcccttcattgcaaggtatgttttccactgatagtatggcgactagaactcagtggccttcacgtctttcactcctaccagacctgagcatcaatgaaaaggaagcgaaaacatatgagagcgcaagctccttgtcactagcaacttttgcttcacttctagtagaatttgtggcaagacttggatatttggtggaggcctttgaggaactcagtgagaaagcagctttcaaggagcaaagtgagctagaagacgaaaaggcgagtaatgggctctggcataagttgatggtgtcccttcagttcagaaataagggtgggcgcgccgacccagctttcttgtacaaagttggcattataagaaagcattgcttatcaatttgttgcaacgaacaggtcactatcagtcaaaataaaatcattatttgccatccagctgatatcccctatagtgagtcgtattacatggtcatagctgtttcctggcagctctggcccgtgtctcaaaatctctgatgttacattgcacaagataaaaatatatcatcatgaacaataaaactgtctgcttacataaacagtaatacaaggggtgttatgagccatattcaacgggaaacgtcgaggccgcgattaaattccaacatggatgctgatttatatgggtataaatgggctcgcgataatgtcgggcaatcaggtgcgacaatctatcgcttgtatgggaagcccgatgcgccagagttgtttctgaaacatggcaaaggtagcgttgccaatgatgttacagatgagatggtcagactaaactggctgacggaatttatgcctcttccgaccatcaagcattttatccgtactcctgatgatgcatggttactcaccactgcgatccccggaaaaacagcattccaggtattagaagaatatcctgattcaggtgaaaatattgttgatgcgctggcagtgttcctgcgccggttgcattcgattcctgtttgtaattgtccttttaacagcgatcgcgtatttcgtctcgctcaggcgcaatcacgaatgaataacggtttggttgatgcgagtgattttgatgacgagcgtaatggctggcctgttgaacaagtctggaaagaaatgcataaacttttgccattctcaccggattcagtcgtcactcatggtgatttctcacttgataaccttatttttgacgaggggaaattaataggttgtattgatgttggacgagtcggaatcgcagaccgataccaggatcttgccatcctatggaactgcctcggtgagttttctccttcattacagaaacggctttttcaaaaatatggtattgataatcctgatatgaataaattgcagtttcatttgatgctcgatgagtttttctaatcagaattggttaattggttgtaacactggcagagcattacgctgacttgacgggacggcgcaagctcatgaccaaaatcccttaacgtgagttacgcgtcgttccactgagcgtcagaccccgtagaaaagatcaaaggatcttcttgagatcctttttttctgcgcgtaatctgctgcttgcaaacaaaaaaaccaccgctaccagcggtggtttgtttgccggatcaagagctaccaactctttttccgaaggtaactggcttcagcagagcgcagataccaaatactgtccttctagtgtagccgtagttaggccaccacttcaagaactctgtagcaccgcctacatacctcgctctgctaatcctgttaccagtggctgctgccagtggcgataagtcgtgtcttaccgggttggactcaagacgatagttaccggataaggcgcagcggtcgggctgaacggggggttcgtgcacacagcccagcttggagcgaacgacctacaccgaactgagatacctacagcgtgagcattgagaaagcgccacgcttcccgaagggagaaaggcggacaggtatccggtaagcggcagggtcggaacaggagagcgcacgagggagcttccagggggaaacgcctggtatctttatagtcctgtcgggtttcgccacctctgacttgagcgtcgatttttgtgatgctcgtcaggggggcggagcctatggaaaaacgccagcaacgcggcctttttacggttcctggccttttgctggccttttgctcacatgttctttcctgcgttatcccctgattctgtggataaccgtattaccgcctttgagtgagctgataccgctcgccgcagccgaacgaccgagcgcagcgagtcagtgagcgaggaagcggaagagcgcccaatacgcaaaccgcctctccccgcgcgttggccgattcattaatgcagctggcacgacaggtttcccgactggaaagcgggcagtgagcgcaacgcaattaatacgcgtaccgctagccaggaagagtttgtagaaacgcaaaaaggccatccgtcaggatggccttctgcttagtttgatgcctggcagtttatggcgggcgtcctgcccgccaccctccgggccgttgcttcacaacgttcaaatccgctcccggcggatttgtcctactcaggagagcgttcaccgacaaacaacagataaaacgaaaggcccagtcttccgactgagcctttcgttttatttgatgc

SEQ ID NO: 75 - DNA, 4227 bp, Artificial Sequence
  Synthetic oligonucleotide sequence
ctggcagttccctactctcgcgttaacgctagcatggatgttttcccagtcacgacgttgtaaaacgacggccagtcttaagctcgggccccaaataatgattttattttgactgatagtgacctgttcgttgcaacaaattgatgagcaatgcttttttataatgccaactttgtacaaaaaagcaggctccgcggccgcccccttcaccatgaatcataatcacgatcccaaaactccccttctcccaacccatcatgatgatgatcatcaagggcggccaacacctgagcgttccacctcagttatcatgtcccttgccacacccaacacggccttcgtcctcctaggacccctcttgtgtacccttgtaatgttgtgtgtcaagttcgatgggaccgagtcgagccggaacatgctggctatcctggtctggatcttcacgtggtggctcaccgaggctgttccgatgcctatcacctccatgtcgccgttgtttctatttccggtgtttggtatcgcctcggccgacgctgttgctaagtcgtacatggacgatgtcatctctcttgtgcttggtagcttcattcttgctcttgctgttgagcactacaatattcacaagaggctggccttgaatataacattgttattctgtggggacccagtgaacccaccgttgctcctcctggggatctgcgccaccacagctttcgtcagcatgtggatgcacaacgtggcagccaccgtcatgatgatgccagtggccaccggaatcctccagagatttccatccacaagagaaggcggccgaaacgacgccgttgacaagttcagtagggcagttgtgcttggggtgatatactctgccacaattggtggtatcagcactctgactgggacaggtgtcaacctcatattggctggcatgtggaagagctatttccctcaagcggaccccatcagcttcaacacgtggctcttttatgggttcccattggctgtctttatcttcttctcgttgtgggccatactttgttgtttgtattgcaaacgtgggtcgggccgggtccttcaggagtatttggataaggatcaccttcaaagagagctcgacttgttaggtccaatgtcctttgcagaaaaaatggtattatccgtctttttggggcttattatgctatggatgacaaggaatctaaccgatggtatccctggatggggagctctatttaaagggagggccggtgatggcactgctagtgttatgatggcaactttgttattcataatacccaacaagaggagaaagggagaaaagctaatggactggactaagtgcaagaaactaccttggaacgttgttcttctacttggggccggctttgccatcgcagatggggtgcggtcaagcggcctagcggacgtgctttcccgcgccttggacttcctagagacggctccattttgggcaattgcacccatggtgtgtctcataggtgggatcatgaccgagttcacctccaacaatgccaccacgacattgttggttcctctgttgatccaaattgcacagacgatgcacgtgcatccgcttcttcttatggtccctggagccgttggggcccaattcgccttcttgcttccgactggaactccttccaatatagttgggttcaccactggtcatattgacatcaaggatatgattaaaactggtctccctctaaagattgctgggacagttgtactctcatttttaatgcctacccttggagcctacgtttttgggacaaacaacaaaccgctgatgtacccacaaagttggcgtagtttgtattcaaattcgggatatacaaagggtgggcgcgccgacccagctttcttgtacaaagttggcattataagaaagcattgcttatcaatttgttgcaacgaacaggtcactatcagtcaaaataaaatcattatttgccatccagctgatatcccctatagtgagtcgtattacatggtcatagctgtttcctggcagctctggcccgtgtctcaaaatctctgatgttacattgcacaagataaaaatatatcatcatgaacaataaaactgtctgcttacataaacagtaatacaaggggtgttatgagccatattcaacgggaaacgtcgaggccgcgattaaattccaacatggatgctgatttatatgggtataaatgggctcgcgataatgtcgggcaatcaggtgcgacaatctatcgcttgtatgggaagcccgatgcgccagagttgtttctgaaacatggcaaaggtagcgttgccaatgatgttacagatgagatggtcagactaaactggctgacggaatttatgcctcttccgaccatcaagcattttatccgtactcctgatgatgcatggttactcaccactgcgatccccggaaaaacagcattccaggtattagaagaatatcctgattcaggtgaaaatattgttgatgcgctggcagtgttcctgcgccggttgcattcgattcctgtttgtaattgtccttttaacagcgatcgcgtatttcgtctcgctcaggcgcaatcacgaatgaataacggtttggttgatgcgagtgattttgatgacgagcgtaatggctggcctgttgaacaagtctggaaagaaatgcataaacttttgccattctcaccggattcagtcgtcactcatggtgatttctcacttgataaccttatttttgacgaggggaaattaataggttgtattgatgttggacgagtcggaatcgcagaccgataccaggatcttgccatcctatggaactgcctcggtgagttttctccttcattacagaaacggctttttcaaaaatatggtattgataatcctgatatgaataaattgcagtttcatttgatgctcgatgagtttttctaatcagaattggttaattggttgtaacactggcagagcattacgctgacttgacgggacggcgcaagctcatgaccaaaatcccttaacgtgagttacgcgtcgttccactgagcgtcagaccccgtagaaaagatcaaaggatcttcttgagatcctttttttctgcgcgtaatctgctgcttgcaaacaaaaaaaccaccgctaccagcggtggtttgtttgccggatcaagagctaccaactctttttccgaaggtaactggcttcagcagagcgcagataccaaatactgtccttctagtgtagccgtagttaggccaccacttcaagaactctgtagcaccgcctacatacctcgctctgctaatcctgttaccagtggctgctgccagtggcgataagtcgtgtcttaccgggttggactcaagacgatagttaccggataaggcgcagcggtcgggctgaacggggggttcgtgcacacagcccagcttggagcgaacgacctacaccgaactgagatacctacagcgtgagcattgagaaagcgccacgcttcccgaagggagaaaggcggacaggtatccggtaagcggcagggtcggaacaggagagcgcacgagggagcttccagggggaaacgcctggtatctttatagtcctgtcgggtttcgccacctctgacttgagcgtcgatttttgtgatgctcgtcaggggggcggagcctatggaaaaacgccagcaacgcggcctttttacggttcctggccttttgctggccttttgctcacatgttctttcctgcgttatcccctgattctgtggataaccgtattaccgcctttgagtgagctgataccgctcgccgcagccgaacgaccgagcgcagcgagtcagtgagcgaggaagcggaagagcgcccaatacgcaaaccgcctctccccgcgcgttggccgattcattaatgcagctggcacgacaggtttcccgactggaaagcgggcagtgagcgcaacgcaattaatacgcgtaccgctagccaggaagagtttgtagaaacgcaaaaaggccatccgtcaggatggccttctgcttagtttgatgcctggcagtttatggcgggcgtcctgcccgccaccctccgggccgttgcttcacaacgttcaaatccgctcccggcggatttgtcctactcaggagagcgttcaccgacaaacaacagataaaacgaaaggcccagtcttccgactgagcctttcgttttatttgatgc

SEQ ID NO: 76 - DNA, 4335 bp, Artificial Sequence
  Synthetic oligonucleotide sequence
ctggcagttccctactctcgcgttaacgctagcatggatgttttcccagtcacgacgttgtaaaacgacggccagtcttaagctcgggccccaaataatgattttattttgactgatagtgacctgttcgttgcaacaaattgatgagcaatgcttttttataatgccaactttgtacaaaaaagcaggctccgcggccgcccccttcaccatgggtggtagcaatgcattgaatgagatgaccaatggatctgatggtattactgggggtgttgctgatgtctatggtgaagagtttgccacccaggatcagcttgtcaccccttggagcttctctgttgcttgtggtcattcattgttgagagatccccagcacaacaaagggcttgcttttacagagaaagagagagatgcccacttcttgcgcggtctgttaccccctgtagttctgtcacaagagctccaggagaagaagttcttgacgactcttcgtcaatatcaagttcccttgcagaaatacatggccatgatggatcttcaggagaggaatgagaaactgttctacaaacttcttgttgaccatgtcgaagaactgcttcctcttgtttatacgccaactgttggtgagggatgccaaaagtatggaagtatttttagacgtccccaggggctattcatcagtttgaaggataagggaagaatccttgagcttttgagaaactggcctgaaaagaaaattcaagttattgtagttactgatggtgaacgcatactggggctaggagaccttggctgtcagggaatgggaatacctgttggaaaactttccttgtattcagcccttggtggagtctgcccatcagcatgcttgcctataacccttgatgttggcaccaacaatcagaagttgttagatgatgaattttacattggattgaagcagaagcgggctactggagaggaatatgctgagtttgtccaagaattcatgtctgcagttaagcaaaactatggggagaagatccttgtacagtttgaagattttgccaaccataacgcatttgagttgctggagaaataccgcaccactcacctcgtcttcaatgatgacattcagggtactgcttctgttgttcttgcaggacttattgcttctttaaaactactagggggaaccttggctgaccataaatttttgttcctcggtgctggagaagctggaacgggtattgcagagcttatagcccttgagatgtcaaagaagacaaaggctccagtagagcagatgaggaaaaagatttggcttgtcgactccaagggacttgttgttagctctaggaaggagacacttcagcagttcaaactaccttgggctcacgaacatgaacccattacaactcttatagatgctgtccaggcaatcaagcccacagtgttgattggtacttctggaaaagggaaacaatttaccaaggaggtcgttgaagccatggcaaatatcaatgcgaaacctctcattcttgctctatcaaatcctacttcacagtcagaatgtactgccgaagaagcctacacatggagtcagggacatgcaatatttgccagtggaagcccatttgaccctgttgaatatgaaggaagaacttttgtccctggccaggcaaataatgcttacattttccctgggtttggtttgggtctgatcatgtgtggtgcaatccgtgtccatgatgacatgctattggctgcctctgaggcactggcttcacaagttacaggagaacatttcataaagggacttatctacccaccattcaaggacatcagaaagatatcagctcacattgctgccggagtagctgcaaaagcttatgaacttggtttggctagtcggcttcctcaaccagccgatcttgttaagtttgccgagagctgcatgtacaaccctacttaccggagtttccgtaagggtgggcgcgccgacccagctttcttgtacaaagttggcattataagaaagcattgcttatcaatttgttgcaacgaacaggtcactatcagtcaaaataaaatcattatttgccatccagctgatatcccctatagtgagtcgtattacatggtcatagctgtttcctggcagctctggcccgtgtctcaaaatctctgatgttacattgcacaagataaaaatatatcatcatgaacaataaaactgtctgcttacataaacagtaatacaaggggtgttatgagccatattcaacgggaaacgtcgaggccgcgattaaattccaacatggatgctgatttatatgggtataaatgggctcgcgataatgtcgggcaatcaggtgcgacaatctatcgcttgtatgggaagcccgatgcgccagagttgtttctgaaacatggcaaaggtagcgttgccaatgatgttacagatgagatggtcagactaaactggctgacggaatttatgcctcttccgaccatcaagcattttatccgtactcctgatgatgcatggttactcaccactgcgatccccggaaaaacagcattccaggtattagaagaatatcctgattcaggtgaaaatattgttgatgcgctggcagtgttcctgcgccggttgcattcgattcctgtttgtaattgtccttttaacagcgatcgcgtatttcgtctcgctcaggcgcaatcacgaatgaataacggtttggttgatgcgagtgattttgatgacgagcgtaatggctggcctgttgaacaagtctggaaagaaatgcataaacttttgccattctcaccggattcagtcgtcactcatggtgatttctcacttgataaccttatttttgacgaggggaaattaataggttgtattgatgttggacgagtcggaatcgcagaccgataccaggatcttgccatcctatggaactgcctcggtgagttttctccttcattacagaaacggctttttcaaaaatatggtattgataatcctgatatgaataaattgcagtttcatttgatgctcgatgagtttttctaatcagaattggttaattggttgtaacactggcagagcattacgctgacttgacgggacggcgcaagctcatgaccaaaatcccttaacgtgagttacgcgtcgttccactgagcgtcagaccccgtagaaaagatcaaaggatcttcttgagatcctttttttctgcgcgtaatctgctgcttgcaaacaaaaaaaccaccgctaccagcggtggtttgtttgccggatcaagagctaccaactctttttccgaaggtaactggcttcagcagagcgcagataccaaatactgtccttctagtgtagccgtagttaggccaccacttcaagaactctgtagcaccgcctacatacctcgctctgctaatcctgttaccagtggctgctgccagtggcgataagtcgtgtcttaccgggttggactcaagacgatagttaccggataaggcgcagcggtcgggctgaacggggggttcgtgcacacagcccagcttggagcgaacgacctacaccgaactgagatacctacagcgtgagcattgagaaagcgccacgcttcccgaagggagaaaggcggacaggtatccggtaagcggcagggtcggaacaggagagcgcacgagggagcttccagggggaaacgcctggtatctttatagtcctgtcgggtttcgccacctctgacttgagcgtcgatttttgtgatgctcgtcaggggggcggagcctatggaaaaacgccagcaacgcggcctttttacggttcctggccttttgctggccttttgctcacatgttctttcctgcgttatcccctgattctgtggataaccgtattaccgcctttgagtgagctgataccgctcgccgcagccgaacgaccgagcgcagcgagtcagtgagcgaggaagcggaagagcgcccaatacgcaaaccgcctctccccgcgcgttggccgattcattaatgcagctggcacgacaggtttcccgactggaaagcgggcagtgagcgcaacgcaattaatacgcgtaccgctagccaggaagagtttgtagaaacgcaaaaaggccatccgtcaggatggccttctgcttagtttgatgcctggcagtttatggcgggcgtcctgcccgccaccctccgggccgttgcttcacaacgttcaaatccgctcccggcggatttgtcctactcaggagagcgttcaccgacaaacaacagataaaacgaaaggcccagtcttccgactgagcctttcgttttatttgatgc

SEQ ID NO: 77 - DNA, 5427 bp, Artificial Sequence
  Synthetic oligonucleotide sequence
ctggcagttccctactctcgcgttaacgctagcatggatgttttcccagtcacgacgttgtaaaacgacggccagtcttaagctcgggccccaaataatgattttattttgactgatagtgacctgttcgttgcaacaaattgatgagcaatgcttttttataatgccaactttgtacaaaaaagcaggctccgcggccgcccccttcaccatggcgtcagctttcaaggggatcttgatcagatctccacctgatgtctgtgcagagacagtagcaaaagtgagccaatgcaatcgagctcaacttgttaagaattcgtccactggttttaaaaatatcttcaaattatcagaggccaggaaatttcacgctccagttgcaagtcatttgaggtcacaagccgtcatggccccagcctcagacccaacatcaactgcaataaagagagtattcacctttggtaaaggaaggagtgaaggcaacaagggtatgaagtccttgttgggaggtaaaggagcaaaccttgcagagatggccagcataggcttatccgtcccacctggattgactatttctacagaagcatgccaagagtaccaggagcatggaaaacagctctctgctggtttgtgggaggagatattggagggattgagagtcatagagaaggatatggggtcttaccttggagacccttctaagcctcttctgctttcagttcgttctggtgctgcgatttccatgccagggatgatggacactgtcctcaatctaggacttaatgacgatgtggttgcaggactggcagcaaaaagtggagaacgctttgcttacgactcatacagacgtttcctggacatgtttggtaatgtagtcatgggtatttctcactcatcatttgaagagaagttagaaaagttgaagcaggcaaaaggtgttaaacttgatacggagctaactgcatctgatctaaaagaggtagtagaacagtacaagaacgtctatcttgaagtaaaaggagaaaagtttcctgctgatccagaaagacagcttcagcttgctattcaagcagtatttgattcatgggatagtccaagggccatcaagtatcggaacattaaccagataacaggactgaaagggactgcagttaatatccagtgtatggtgtttggtaacatgggaaatacttcagggactggtgttcttttcactcgaaacccaagcactggtgaaaagaagctctatggggaattcctgattaatgctcagggagaagatgtagttgccggcattagaacgccagaagacttggacaccatgaggagctgcatgcctgaagcttacaaggagcttgtggagaactgtgaaattctggaacgacattacaaggatatgatggatattgaattcactgttcaagaaaataggctatggatgttgcaatgccgatctggtaaacgaactggtaaaggtgctgtgaagatagctgtagacttggtgaaagaaggaatagtcgacacttacactgctattaagatggtggaaccacagcatcttgatcaacttcttcacccacagtttgaagacccatctgcttataaagacagagtgattgctactggcctgccggcatctcctggagctgctgttgggcagattattttcagtgctgatgaagctgaatcatggcaagcacaaggaaagagtgtcattctggtgaggaatgaaactagcccagaggatgttgggggtatgcatgcagcaattggaatcttaactgctaggggtggcatgacatctcatgcagctgttgtagcccgtgggtggggaaaatgttgtgtttcagggtgctctgaaatccgagtgaatgatacagacaaggttcttttggttggagacaaagtaatatcagaaggtgattggctttcacttaatggatctactggtgaagttatcttagggaaagtaccactttcacctcctgctctcagtggggatctagaaaccttcatgtcttgggcggatgatatacgtgtccttaaggtcatggcaaatgctgacacaccagaggatgctttggcagcaagaaacaatggtgctgaaggaattggactttgcaggacagagcacatgttttttgcttcagatgataggattaagacagtgaggaagatgataatggcagtaacatccgaacagagaaaagtggctctggaccagctattgccttatcaaagatccgacttcgaagggatttttcgggcaatggatggtcttccagtgacaattagattgttggaccctccactacatgagttccttcctgaaggtgatgtagaacaaattgtcagtgaacttaccttggagactggcatggctgaagatgaaatcttttccaggattgaaaagttgtcagaggtcaatcctatgttgggtttcagaggctgcaggttggggatatcatacccagaactaactgaaatgcaagcacgggcaatcttccaagctgctgtttcaatgagcaaccagggtgttaaagtttttcctgagataatggttccccttgtaggaacgcctcaggaattaggacatcaagtgagcttgatacggaatgttgcagaaaaggtattctctgagacgggttcctccttgagttacaaggtgggaacaatgattgagatccctagggcggctctggttgcagatgagattgcaatggaagcagaattcttctcttttgggacgaatgatctcacgcaaatgacctttgggtatagcagagatgatgttggcaagttcctccctgtatacttgtccaagggcatacttcagagtgatccatttgaggttttggaccagaaaggtgtgggccaactcatcaaactagcaacggagaagggccgtagtgcaaggcctagcttaaaggttggcatatgtggggagcatggaggagaaccgtcatctgttgcatttttcgcggaagcaggattggactacgtttcatgttcccctttcagggttccaattgcaaggctggcagcagctcaagtcgttaagggtgggcgcgccgacccagctttcttgtacaaagttggcattataagaaagcattgcttatcaatttgttgcaacgaacaggtcactatcagtcaaaataaaatcattatttgccatccagctgatatcccctatagtgagtcgtattacatggtcatagctgtttcctggcagctctggcccgtgtctcaaaatctctgatgttacattgcacaagataaaaatatatcatcatgaacaataaaactgtctgcttacataaacagtaatacaaggggtgttatgagccatattcaacgggaaacgtcgaggccgcgattaaattccaacatggatgctgatttatatgggtataaatgggctcgcgataatgtcgggcaatcaggtgcgacaatctatcgcttgtatgggaagcccgatgcgccagagttgtttctgaaacatggcaaaggtagcgttgccaatgatgttacagatgagatggtcagactaaactggctgacggaatttatgcctcttccgaccatcaagcattttatccgtactcctgatgatgcatggttactcaccactgcgatccccggaaaaacagcattccaggtattagaagaatatcctgattcaggtgaaaatattgttgatgcgctggcagtgttcctgcgccggttgcattcgattcctgtttgtaattgtccttttaacagcgatcgcgtatttcgtctcgctcaggcgcaatcacgaatgaataacggtttggttgatgcgagtgattttgatgacgagcgtaatggctggcctgttgaacaagtctggaaagaaatgcataaacttttgccattctcaccggattcagtcgtcactcatggtgatttctcacttgataaccttatttttgacgaggggaaattaataggttgtattgatgttggacgagtcggaatcgcagaccgataccaggatcttgccatcctatggaactgcctcggtgagttttctccttcattacagaaacggctttttcaaaaatatggtattgataatcctgatatgaataaattgcagtttcatttgatgctcgatgagtttttctaatcagaattggttaattggttgtaacactggcagagcattacgctgacttgacgggacggcgcaagctcatgaccaaaatcccttaacgtgagttacgcgtcgttccactgagcgtcagaccccgtagaaaagatcaaaggatcttcttgagatcctttttttctgcgcgtaatctgctgcttgcaaacaaaaaaaccaccgctaccagcggtggtttgtttgccggatcaagagctaccaactctttttccgaaggtaactggcttcagcagagcgcagataccaaatactgtccttctagtgtagccgtagttaggccaccacttcaagaactctgtagcaccgcctacatacctcgctctgctaatcctgttaccagtggctgctgccagtggcgataagtcgtgtcttaccgggttggactcaagacgatagttaccggataaggcgcagcggtcgggctgaacggggggttcgtgcacacagcccagcttggagcgaacgacctacaccgaactgagatacctacagcgtgagcattgagaaagcgccacgcttcccgaagggagaaaggcggacaggtatccggtaagcggcagggtcggaacaggagagcgcacgagggagcttccagggggaaacgcctggtatctttatagtcctgtcgggtttcgccacctctgacttgagcgtcgatttttgtgatgctcgtcaggggggcggagcctatggaaaaacgccagcaacgcggcctttttacggttcctggccttttgctggccttttgctcacatgttctttcctgcgttatcccctgattctgtggataaccgtattaccgcctttgagtgagctgataccgctcgccgcagccgaacgaccgagcgcagcgagtcagtgagcgaggaagcggaagagcgcccaatacgcaaaccgcctctccccgcgcgttggccgattcattaatgcagctggcacgacaggtttcccgactggaaagcgggcagtgagcgcaacgcaattaatacgcgtaccgctagccaggaagagtttgtagaaacgcaaaaaggccatccgtcaggatggccttctgcttagtttgatgcctggcagtttatggcgggcgtcctgcccgccaccctccgggccgttgcttcacaacgttcaaatccgctcccggcggatttgtcctactcaggagagcgttcaccgacaaacaacagataaaacgaaaggcccagtcttccgactgagcctttcgttttatttgatgc

SEQ ID NO: 78 - DNA, 3789 bp, Artificial Sequence
  Synthetic oligonucleotide sequence
ctggcagttccctactctcgcgttaacgctagcatggatgttttcccagtcacgacgttgtaaaacgacggccagtcttaagctcgggccccaaataatgattttattttgactgatagtgacctgttcgttgcaacaaattgatgagcaatgcttttttataatgccaactttgtacaaaaaagcaggctccgcggccgcccccttcaccatgttagcttgtgctagcctcggcctcccaaaaacccaaccgccaccgccactagtttcaccggcacctgaaccaagccgtccggccccagccccatccgtttctctctcctctgactcagcaacctcacttcctcaggcccaaccccaggcccgaaaattaaagggcagctcaaagctgaacctctggtcaagaaatcgggccatacggtccggccggaaactgaaccggccggctaaaaatacggcccaggccgccgttgaaattgcgaattatcctcgaaccagggtcgatgggtccgattctgacggagaagatgacggcgatattcgagaggggaaggcgatatacatggtgtctgacggaactgggtggacggcggaacacgccgttacggcagctttgggtcagttcgattattgcttggtcgatcatggttgccctgttaatacccatttgttttctgggatagatgatgtagagcgtctgatggaaattgtgaaacaagcagcaaaagaaggtgctatgcttgtctatacgcttgctgattcatcaatggctgaatctgccaaaaaagcctgcaaactgtggggtgttccatcaaccgatgttctgggcccaataacggagtcaattgcttctcatcttggcgcctcaccttcaggactccctcgtggtgctggaggtgtaaatgttcccctaagtgaagactatttccgaagaattgaagccatagagtttaccatcaagcaagatgatggggctcttcctcagaacttgcataaggctgaacttgtactcactggtgtatctcgaactggaaaaactccactatcaatttacctggcacaaaaaggatacaaagtggcaaatgttccaatcgtaatgggtgtggatttaccaaaaactctgtttgagatagaccctgataaggtttttggtttgactataaatccggtaatcttgcaatcaattaggaagtcacgagccaagagcctgggattagctgaagatgagacgactagctattctgaaatggactatgtgagaggcgagttggtgaacgcgactaaaatcttctcacaaaatcctaagtggcgggtcgttgaggtgactagtaaagccattgaagaatctgcagcagttatcttgaggctgtaccatgacagaaagcagaagtgtttgatgcccagaatatctaagcgctataagggtgggcgcgccgacccagctttcttgtacaaagttggcattataagaaagcattgcttatcaatttgttgcaacgaacaggtcactatcagtcaaaataaaatcattatttgccatccagctgatatcccctatagtgagtcgtattacatggtcatagctgtttcctggcagctctggcccgtgtctcaaaatctctgatgttacattgcacaagataaaaatatatcatcatgaacaataaaactgtctgcttacataaacagtaatacaaggggtgttatgagccatattcaacgggaaacgtcgaggccgcgattaaattccaacatggatgctgatttatatgggtataaatgggctcgcgataatgtcgggcaatcaggtgcgacaatctatcgcttgtatgggaagcccgatgcgccagagttgtttctgaaacatggcaaaggtagcgttgccaatgatgttacagatgagatggtcagactaaactggctgacggaatttatgcctcttccgaccatcaagcattttatccgtactcctgatgatgcatggttactcaccactgcgatccccggaaaaacagcattccaggtattagaagaatatcctgattcaggtgaaaatattgttgatgcgctggcagtgttcctgcgccggttgcattcgattcctgtttgtaattgtccttttaacagcgatcgcgtatttcgtctcgctcaggcgcaatcacgaatgaataacggtttggttgatgcgagtgattttgatgacgagcgtaatggctggcctgttgaacaagtctggaaagaaatgcataaacttttgccattctcaccggattcagtcgtcactcatggtgatttctcacttgataaccttatttttgacgaggggaaattaataggttgtattgatgttggacgagtcggaatcgcagaccgataccaggatcttgccatcctatggaactgcctcggtgagttttctccttcattacagaaacggctttttcaaaaatatggtattgataatcctgatatgaataaattgcagtttcatttgatgctcgatgagtttttctaatcagaattggttaattggttgtaacactggcagagcattacgctgacttgacgggacggcgcaagctcatgaccaaaatcccttaacgtgagttacgcgtcgttccactgagcgtcagaccccgtagaaaagatcaaaggatcttcttgagatcctttttttctgcgcgtaatctgctgcttgcaaacaaaaaaaccaccgctaccagcggtggtttgtttgccggatcaagagctaccaactctttttccgaaggtaactggcttcagcagagcgcagataccaaatactgtccttctagtgtagccgtagttaggccaccacttcaagaactctgtagcaccgcctacatacctcgctctgctaatcctgttaccagtggctgctgccagtggcgataagtcgtgtcttaccgggttggactcaagacgatagttaccggataaggcgcagcggtcgggctgaacggggggttcgtgcacacagcccagcttggagcgaacgacctacaccgaactgagatacctacagcgtgagcattgagaaagcgccacgcttcccgaagggagaaaggcggacaggtatccggtaagcggcagggtcggaacaggagagcgcacgagggagcttccagggggaaacgcctggtatctttatagtcctgtcgggtttcgccacctctgacttgagcgtcgatttttgtgatgctcgtcaggggggcggagcctatggaaaaacgccagcaacgcggcctttttacggttcctggccttttgctggccttttgctcacatgttctttcctgcgttatcccctgattctgtggataaccgtattaccgcctttgagtgagctgataccgctcgccgcagccgaacgaccgagcgcagcgagtcagtgagcgaggaagcggaagagcgcccaatacgcaaaccgcctctccccgcgcgttggccgattcattaatgcagctggcacgacaggtttcccgactggaaagcgggcagtgagcgcaacgcaattaatacgcgtaccgctagccaggaagagtttgtagaaacgcaaaaaggccatccgtcaggatggccttctgcttagtttgatgcctggcagtttatggcgggcgtcctgcccgccaccctccgggccgttgcttcacaacgttcaaatccgctcccggcggatttgtcctactcaggagagcgttcaccgacaaacaacagataaaacgaaaggcccagtcttccgactgagcctttcgttttatttgatgc

SEQ ID NO: 79 - DNA, 14324 bp, Artificial Sequence
  Synthetic oligonucleotide sequence
gtttacccgccaatatatcctgtcaaacactgatagtttaaactgaaggcgggaaacgacaatctgatccaagctcaagctgctctagcattcgccattcaggctgcgcaactgttgggaagggcgatcggtgcgggcctcttcgctattacgccagctggcgaaagggggatgtgctgcaaggcgattaagttgggtaacgccagggttttcccagtcacgacgttgtaaaacgacggccagtgccaagcttgcatgcctgcaggtcgactctagagttatcaacaagtttgtacaaaaaagctgaacgagaaacgtaaaatgatataaatatcaatatattaaattagattttgcataaaaaacagactacataatactgtaaaacacaacatatccagtcactatggcggcccctcgaggggccgcattaggcaccccaggctttacactttatgcttccggctcgtataatgtgtggattttgagttaggatccggcgagattttcaggagctaaggaagctaaaatggagaaaaaaatcactggatataccaccgttgatatatcccaatggcatcgtaaagaacattttgaggcatttcagtcagttgctcaatgtacctataaccagaccgttcagctggatattacggcctttttaaagaccgtaaagaaaaataagcacaagttttatccggcctttattcacattcttgcccgcctgatgaatgctcatccggaattccgtatggcaatgaaagacggtgagctggtgatatgggatagtgttcacccttgttacaccgttttccatgagcaaactgaaacgttttcatcgctctggagtgaataccacgacgatttccggcagtttctacacatatattcgcaagatgtggcgtgttacggtgaaaacctggcctatttccctaaagggtttattgagaatatgtttttcgtctcagccaatccctgggtgagtttcaccagttttgatttaaacgtggccaatatggacaacttcttcgcccccgttttcaccatgggcaaatattatacgcaaggcgacaaggtgctgatgccgctggcgattcaggttcatcatgccgtctgtgatggcttccatgtcggcagaatgcttaatgaattacaacagtactgcgatgagtggcagggcggggcgtaaagatctggatccggcttactaaaagccagataacagtatgcgtatttgcgcgctgatttttgcggtataagaatatatactgatatgtatacccgaagtatgtcaaaaagaggtgtgctatgaagcagcgtattacagtgacagttgacagcgacagctatcagttgctcaaggcatatatgatgtcaatatctccggtctggtaagcacaaccatgcagaatgaagcccgtcgtctgcgtgccgaacgctggaaagcggaaaatcaggaagggatggctgaggtcgcccggtttattgaaatgaacggctcttttgctgacgagaacagggactggtgaaatgcagtttaaggtttacacctataaaagagagagccgttatcgtctgtttgtggatgtacagagtgatattattgacacgcccgggcgacggatggtgatccccctggccagtgcacgtctgctgtcagataaagtctcccgtgaactttacccggtggtgcatatcggggatgaaagctggcgcatgatgaccaccgatatggccagtgtgccggtctccgttatcggggaagaagtggctgatctcagccaccgcgaaaatgacatcaaaaacgccattaacctgatgttctggggaatataaatgtcaggctcccttatacacagccagtctgcaggtcgaccatagtgactggatatgttgtgttttacagtattatgtagtctgttttttatgcaaaatctaatttaatatattgatatttatatcattttacgtttctcgttcagctttcttgtacaaagtggttgataacagcatgttacgtcctgtagaaaccccaacccgtgaaatcaaaaaactcgacggcctgtgggcattcagtctggatcgcgaaaactgtggaattgatcagcgttggtgggaaagcgcgttacaagaaagccgggcaattgctgtgccaggcagttttaacgatcagttcgccgatgcagatattcgtaattatgcgggcaacgtctggtatcagcgcgaagtctttataccgaaaggttgggcaggccagcgtatcgtgctgcgtttcgatgcggtcactcattacggcaaagtgtgggtcaataatcaggaagtgatggagcatcagggcggctatacgccatttgaagccgatgtcacgccgtatgttattgccgggaaaagtgtacgtatcaccgtttgtgtgaacaacgaactgaactggcagactatcccgccgggaatggtgattaccgacgaaaacggcaagaaaaagcagtcttacttccatgatttctttaactatgccggaatccatcgcagcgtaatgctctacaccacgccgaacacctgggtggacgatatcaccgtggtgacgcatgtcgcgcaagactgtaaccacgcgtctgttgactggcaggtggtggccaatggtgatgtcagcgttgaactgcgtgatgcggatcaacaggtggttgcaactggacaaggcactagcgggactttgcaagtggtgaatccgcacctctggcaaccgggtgaaggttatctctatgaactgtgcgtcacagccaaaagccagacagagtgtgatatctacccgcttcgcgtcggcatccggtcagtggcagtgaagggcgaacagttcctgattaaccacaaaccgttctactttactggctttggtcgtcatgaagatgcggacttgcgtggcaaaggattcgataacgtgctgatggtgcacgaccacgcattaatggactggattggggccaactcctaccgtacctcgcattacccttacgctgaagagatgctcgactgggcagatgaacatggcatcgtggtgattgatgaaactgctgctgtcggctttaacctctctttaggcattggtttcgaagcgggcaacaagccgaaagaactgtacagcgaagaggcagtcaacggggaaactcagcaagcgcacttacaggcgattaaagagctgatagcgcgtgacaaaaaccacccaagcgtggtgatgtggagtattgccaacgaaccggatacccgtccgcaaggtgcacgggaatatttcgcgccactggcggaagcaacgcgtaaactcgacccgacgcgtccgatcacctgcgtcaatgtaatgttctgcgacgctcacaccgataccatcagcgatctctttgatgtgctgtgcctgaaccgttattacggatggtatgtccaaagcggcgatttggaaacggcagagaaggtactggaaaaagaacttctggcctggcaggagaaactgcatcagccgattatcatcaccgaatacggcgtggatacgttagccgggctgcactcaatgtacaccgacatgtggagtgaagagtatcagtgtgcatggctggatatgtatcaccgcgtctttgatcgcgtcagcgccgtcgtcggtgaacaggtatggaatttcgccgattttgcgacctcgcaaggcatattgcgcgttggcggtaacaagaaagggatcttcactcgcgaccgcaaaccgaagtcggcggcttttctgctgcaaaaacgctggactggcatgaacttcggtgaaaaaccgcagcagggaggcaaacaagctagcggaggaggtgccatggaagacgccaaaaacataaagaaaggcccggcgccattctatccgctggaagatggaaccgctggagagcaactgcataaggctatgaagagatacgccctggttcctggaacaattgcttttacagatgcacatatcgaggtggacatcacttacgctgagtacttcgaaatgtccgttcggttggcagaagctatgaaacgatatgggctgaatacaaatcacagaatcgtcgtatgcagtgaaaactctcttcaattctttatgccggtgttgggcgcgttatttatcggagttgcagttgcgcccgcgaacgacatttataatgaacgtgaattgctcaacagtatgggcatttcgcagcctaccgtggtgttcgtttccaaaaaggggttgcaaaaaattttgaacgtgcaaaaaaagctcccaatcatccaaaaaattattatcatggattctaaaacggattaccagggatttcagtcgatgtacacgttcgtcacatctcatctacctcccggttttaatgaatacgattttgtgccagagtccttcgatagggacaagacaattgcactgatcatgaactcctctggatctactggtctgcctaaaggtgtcgctctgcctcatagaactgcctgcgtgagattctcgcatgccagagatcctatttttggcaatcaaatcattccggatactgcgattttaagtgttgttccattccatcacggttttggaatgtttactacactcggatatttgatatgtggatttcgagtcgtcttaatgtatagatttgaagaagagctgtttctgaggagccttcaggattacaagattcaaagtgcgctgctggtgccaaccctattctccttcttcgccaaaagcactctgattgacaaatacgatttatctaatttacacgaaattgcttctggtggcgctcccctctctaaggaagtcggggaagcggttgccaagaggttccatctgccaggtatcaggcaaggatatgggctcactgagactacatcagctattctgattacacccgagggggatgataaaccgggcgcggtcggtaaagttgttccattttttgaagcgaaggttgtggatctggataccgggaaaacgctgggcgttaatcaaagaggcgaactgtgtgtgagaggtcctatgattatgtccggttatgtaaacaatccggaagcgaccaacgccttgattgacaaggatggatggctacattctggagacatagcttactgggacgaagacgaacacttcttcatcgttgaccgcctgaagtctctgattaagtacaaaggctatcaggtggctcccgctgaattggaatccatcttgctccaacaccccaacatcttcgacgcaggtgtcgcaggtcttcccgacgatgacgccggtgaacttcccgccgccgttgttgttttggagcacggaaagacgatgacggaaaaagagatcgtggattacgtcgccagtcaagtaacaaccgcgaaaaagttgcgcggaggagttgtgtttgtggacgaagtaccgaaaggtcttaccggaaaactcgacgcaagaaaaatcagagagatcctcataaaggccaagaagggcggaaagatcgccgtgtgagcttagagctcgaatttccccgatcgttcaaacatttggcaataaagtttcttaagattgaatcctgttgccggtcttgcgatgattatcatataatttctgttgaattacgttaagcatgtaataattaacatgtaatgcatgacgttatttatgagatgggtttttatgattagagtcccgcaattatacatttaatacgcgatagaaaacaaaatatagcgcgcaaactaggataaattatcgcgcgcggtgtcatctatgttactagatcgggaattggttccggaaccaattcgtaatcatggtcatagctgtttcctgtgtgaaattgttatccgctcacaattccacacaacatacgagccggaagcataaagtgtaaagcctggggtgcctaatgagtgagctaactcacattaggctgaattaggcgcgcctatttctgaattcccgatctagtaacatagatgacaccgcgcgcgataatttatcctagtttgcgcgctatattttgttttctatcgcgtattaaatgtataattgcgggactctaatcataaaaacccatctcataaataacgtcatgcattacatgttaattattacatgcttaacgtaattcaacagaaattatatgataatcatcgcaagaccggcaacaggattcaatcttaagaaactttattgccaaatgtttgaacgatcggggatcatccgggtctgtggcgggaactccacgaaaatatccgaacgcagcaagatatcgcggtgcatctcggtcttgcctgggcagtcgccgccgacgccgttgatgtggacgccgggcccgatcatattgtcgctcaggatcgtggcgttgtgcttgtcggccgttgctgtcgtaatgatatcggcaccttcgaccgcctgttccgcagagatcccgtgggcgaagaactccagcatgagatccccgcgctggaggatcatccagccggcgtcccggaaaacgattccgaagcccaacctttcatagaaggcggcggtggaatcgaaatctcgtgatggcaggttgggcgtcgcttggtcggtcatttcgaaccccagagtcccgctcagaagaactcgtcaagaaggcgatagaaggcgatgcgctgcgaatcgggagcggcgataccgtaaagcacgaggaagcggtcagcccattcgccgccaagctcttcagcaatatcacgggtagccaacgctatgtcctgatagcggtccgccacacccagccggccacagtcgatgaatccagaaaagcggccattttccaccatgatattcggcaagcaggcatcgccatgggtcacgacgagatcatcgccgtcgggcatgcgcgccttgagcctggcgaacagttcggctggcgcgagcccctgatgctcttcgtccagatcatcctgatcgacaagaccggcttccatccgagtacgtgctcgctcgatgcgatgtttcgcttggtggtcgaatgggcaggtagccggatcaagcgtatgcagccgccgcattgcatcagccatgatggatactttctcggcaggagcaaggtgagatgacaggagatcctgccccggcacttcgcccaatagcagccagtcccttcccgcttcagtgacaacgtcgagcacagctgcgcaaggaacgcccgtcgtggccagccacgatagccgcgctgcctcgtcctgcagttcattcagggcaccggacaggtcggtcttgacaaaaagaaccgggcgcccctgcgctgacagccggaacacggcggcatcagagcagccgattgtctgttgtgcccagtcatagccgaatagcctctccacccaagcggccggagaacctgcgtgcaatccatcttgttcaatcatgcgaaacgatccagatccggtgcagattatttggattgagagtgaatatgagactctaattggataccgaggggaatttatggaacgtcagtggagcatttttgacaagaaatatttgctagctgatagtgaccttaggcgacttttgaacgcgcaataatggtttctgacgtatgtgcttagctcattaaactccagaaacccgcggctgagtggctccttcaacgttgcggttctgtcagttccaaacgtaaaacggcttgtcccgcgtcatcggcgggggtcataacgtgactcccttaattctccgctcatgatgaattcagaaataaattcagcctaattcggcgttaattcagtacattaaaaacgtccgcaatgtgttattaagttgtctaagcgtcaatttgtttacaccacaatatatcctgccaccagccagccaacagctccccgaccggcagctcggcacaaaatcaccactcgatacaggcagcccatcagtccgggacggcgtcagcgggagagccgttgtaaggcggcagactttgctcatgttaccgatgctattcggaagaacggcaactaagctgccgggtttgaaacacggatgatctcgcggagggtagcatgttgattgtaacgatgacagagcgttgctgcctgtgatcaattcgggcacgaacccagtggacataagcctgttcggttcgtaagctgtaatgcaagtagcgtatgcgctcacgcaactggtccagaaccttgaccgaacgcagcggtggtaacggcgcagtggcggttttcatggcttgttatgactgtttttttggggtacagtctatgcctcgggcatccaagcagcaagcgcgttacgccgtgggtcgatgtttgatgttatggagcagcaacgatgttacgcagcagggcagtcgccctaaaacaaagttaaacatcatgggggaagcggtgatcgccgaagtatcgactcaactatcagaggtagttggcgtcatcgagcgccatctcgaaccgacgttgctggccgtacatttgtacggctccgcagtggatggcggcctgaagccacacagtgatattgatttgctggttacggtgaccgtaaggcttgatgaaacaacgcggcgagctttgatcaacgaccttttggaaacttcggcttcccctggagagagcgagattctccgcgctgtagaagtcaccattgttgtgcacgacgacatcattccgtggcgttatccagctaagcgcgaactgcaatttggagaatggcagcgcaatgacattcttgcaggtatcttcgagccagccacgatcgacattgatctggctatcttgctgacaaaagcaagagaacatagcgttgccttggtaggtccagcggcggaggaactctttgatccggttcctgaacaggatctatttgaggcgctaaatgaaaccttaacgctatggaactcgccgcccgactgggctggcgatgagcgaaatgtagtgcttacgttgtcccgcatttggtacagcgcagtaaccggcaaaatcgcgccgaaggatgtcgctgccgactgggcaatggagcgcctgccggcccagtatcagcccgtcatacttgaagctagacaggcttatcttggacaagaagaagatcgcttggcctcgcgcgcagatcagttggaagaatttgtccactacgtgaaaggcgagatcaccaaggtagtcggcaaataatgtctagctagaaattcgttcaagccgacgccgcttcgcggcgcggcttaactcaagcgttagatgcactaagcacataattgctcacagccaaactatcaggtcaagtctgcttttattatttttaagcgtgcataataagccctacacaaattgggagatatatcatgcatgaccaaaatcccttaacgtgagttttcgttccactgagcgtcagaccccgtagaaaagatcaaaggatcttcttgagatcctttttttctgcgcgtaatctgctgcttgcaaacaaaaaaaccaccgctaccagcggtggtttgtttgccggatcaagagctaccaactctttttccgaaggtaactggcttcagcagagcgcagataccaaatactgtccttctagtgtagccgtagttaggccaccacttcaagaactctgtagcaccgcctacatacctcgctctgctaatcctgttaccagtggctgctgccagtggcgataagtcgtgtcttaccgggttggactcaagacgatagttaccggataaggcgcagcggtcgggctgaacggggggttcgtgcacacagcccagcttggagcgaacgacctacaccgaactgagatacctacagcgtgagctatgagaaagcgccacgcttcccgaagggagaaaggcggacaggtatccggtaagcggcagggtcggaacaggagagcgcacgagggagcttccagggggaaacgcctggtatctttatagtcctgtcgggtttcgccacctctgacttgagcgtcgatttttgtgatgctcgtcaggggggcggagcctatggaaaaacgccagcaacgcggcctttttacggttcctggccttttgctggccttttgctcacatgttctttcctgcgttatcccctgattctgtggataaccgtattaccgcctttgagtgagctgataccgctcgccgcagccgaacgaccgagcgcagcgagtcagtgagcgaggaagcggaagagcgcctgatgcggtattttctccttacgcatctgtgcggtatttcacaccgcatatggtgcactctcagtacaatctgctctgatgccgcatagttaagccagtatacactccgctatcgctacgtgactgggtcatggctgcgccccgacacccgccaacacccgctgacgcgccctgacgggcttgtctgctcccggcatccgcttacagacaagctgtgaccgtctccgggagctgcatgtgtcagaggttttcaccgtcatcaccgaaacgcgcgaggcagggtgccttgatgtgggcgccggcggtcgagtggcgacggcgcggcttgtccgcgccctggtagattgcctggccgtaggccagccatttttgagcggccagcggccgcgataggccgacgcgaagcggcggggcgtagggagcgcagcgaccgaagggtaggcgctttttgcagctcttcggctgtgcgctggccagacagttatgcacaggccaggcgggttttaagagttttaataagttttaaagagttttaggcggaaaaatcgccttttttctcttttatatcagtcacttacatgtgtgaccggttcccaatgtacggctttgggttcccaatgtacgggttccggttcccaatgtacggctttgggttcccaatgtacgtgctatccacaggaaagagaccttttcgacctttttcccctgctagggcaatttgccctagcatctgctccgtacattaggaaccggcggatgcttcgccctcgatcaggttgcggtagcgcatgactaggatcgggccagcctgccccgcctcctccttcaaatcgtactccggcaggtcatttgacccgatcagcttgcgcacggtgaaacagaacttcttgaactctccggcgctgccactgcgttcgtagatcgtcttgaacaaccatctggcttctgccttgcctgcggcgcggcgtgccaggcggtagagaaaacggccgatgccgggatcgatcaaaaagtaatcggggtgaaccgtcagcacgtccgggttcttgccttctgtgatctcgcggtacatccaatcagctagctcgatctcgatgtactccggccgcccggtttcgctctttacgatcttgtagcggctaatcaaggcttcaccctcggataccgtcaccaggcggccgttcttggccttcttcgtacgctgcatggcaacgtgcgtggtgtttaaccgaatgcaggtttctaccaggtcgtctttctgctttccgccatcggctcgccggcagaacttgagtacgtccgcaacgtgtggacggaacacgcggccgggcttgtctcccttcccttcccggtatcggttcatggattcggttagatgggaaaccgccatcagtaccaggtcgtaatcccacacactggccatgccggccggccctgcggaaacctctacgtgcccgtctggaagctcgtagcggatcacctcgccagctcgtcggtcacgcttcgacagacggaaaacggccacgtccatgatgctgcgactatcgcgggtgcccacgtcatagagcatcggaacgaaaaaatctggttgctcgtcgcccttgggcggcttcctaatcgacggcgcaccggctgccggcggttgccgggattctttgcggattcgatcagcggccgcttgccacgattcaccggggcgtgcttctgcctcgatgcgttgccgctgggcggcctgcgcggccttcaacttctccaccaggtcatcacccagcgccgcgccgatttgtaccgggccggatggtttgcgaccgctcacgccgattcctcgggcttgggggttccagtgccattgcagggccggcagacaacccagccgcttacgcctggccaaccgcccgttcctccacacatggggcattccacggcgtcggtgcctggttgttcttgattttccatgccgcctcctttagccgctaaaattcatctactcatttattcatttgctcatttactctggtagctgcgcgatgtattcagatagcagctcggtaatggtcttgccttggcgtaccgcgtacatcttcagcttggtgtgatcctccgccggcaactgaaagttgacccgcttcatggctggcgtgtctgccaggctggccaacgttgcagccttgctgctgcgtgcgctcggacggccggcacttagcgtgtttgtgcttttgctcattttctctttacctcattaactcaaatgagttttgatttaatttcagcggccagcgcctggacctcgcgggcagcgtcgccctcgggttctgattcaagaacggttgtgccggcggcggcagtgcctgggtagctcacgcgctgcgtgatacgggactcaagaatgggcagctcgtacccggccagcgcctcggcaacctcaccgccgatgcgcgtgcctttgatcgcccgcgacacgacaaaggccgcttgtagccttccatccgtgacctcaatgcgctgcttaaccagctccaccaggtcggcggtggcccatatgtcgtaagggcttggctgcaccggaatcagcacgaagtcggctgccttgatcgcggacacagccaagtccgccgcctggggcgctccgtcgatcactacgaagtcgcgccggccgatggccttcacgtcgcggtcaatcgtcgggcggtcgatgccgacaacggttagcggttgatcttcccgcacggccgcccaatcgcgggcactgccctggggatcggaatcgactaacagaacatcggccccggcgagttgcagggcgcgggctagatgggttgcgatggtcgtcttgcctgacccgcctttctggttaagtacagcgataaccttcatgcgttccccttgcgtatttgtttatttactcatcgcatcatatacgcagcgaccgcatgacgcaagctgttttactcaaatacacatcacctttttagacggcggcgctcggtttcttcagcggccaagctggccggccaggccgccagcttggcatcagacaaaccggccaggatttcatgcagccgcacggttgagacgtgcgcgggcggctcgaacacgtacccggccgcgatcatctccgcctcgatctcttcggtaatgaaaaacggttcgtcctggccgtcctggtgcggtttcatgcttgttcctcttggcgttcattctcggcggccgccagggcgtcggcctcggtcaatgcgtcctcacggaaggcaccgcgccgcctggcctcggtgggcgtcacttcctcgctgcgctcaagtgcgcggtacagggtcgagcgatgcacgccaagcagtgcagccgcctctttcacggtgcggccttcctggtcgatcagctcgcgggcgtgcgcgatctgtgccggggtgagggtagggcgggggccaaacttcacgcctcgggccttggcggcctcgcgcccgctccgggtgcggtcgatgattagggaacgctcgaactcggcaatgccggcgaacacggtcaacaccatgcggccggccggcgtggtggtgtcggcccacggctctgccaggctacgcaggcccgcgccggcctcctggatgcgctcggcaatgtccagtaggtcgcgggtgctgcgggccaggcggtctagcctggtcactgtcacaacgtcgccagggcgtaggtggtcaagcatcctggccagctccgggcggtcgcgcctggtgccggtgatcttctcggaaaacagcttggtgcagccggccgcgtgcagttcggcccgttggttggtcaagtcctggtcgtcggtgctgacgcgggcatagcccagcaggccagcggcggcgctcttgttcatggcgtaatgtctccggttctagtcgcaagtattctactttatgcgactaaaacacgcgacaagaaaacgccaggaaaagggcagggcggcagcctgtcgcgtaacttaggacttgtgcgacatgtcgttttcagaagacggctgcactgaacgtcagaagccgactgcactatagcagcggaggggttggatcaaagtactttgatcccgaggggaaccctgtggttggcatgcacatacaaatggacgaacggataaaccttttcacgcccttttaaatatccgattattctaataaacgctcttttctcttag

SEQ ID NO: 80 - DNA, 1559 bp, Artificial Sequence
  Synthetic oligonucleotide sequence
caaataatgattttattttgactgatagtgacctgttcgttgcaacaaattgataagcaatgcttttttataatgccaactttgtacaaaaaagcaggctgatttctatcaatgaaagtagacgttaaaaaaaaaaaaagatatcacagtacgtggaaacacgtgacacatattttaaagggaaaatataaacgtgaaatgcgtggaaactggcaagtagactattaatatttatgggcctatagtggttatatcaggctttattgggctctctatacgaattaaaagcctcaaacaaataatagaacttgaattgtaggcttttgtacccaccaaactggccgccggtgaccccctctcacgccgtatctctttttctttttcttgtttttttttttttttttttttttttttttttttgtgtgcgcgtatttgtttcaccatcaaaaaattaattttgttttaagtgttttattttccttcgttttgtttaaagtgtttaaaatcgttagttcaatgttgaaaaatatacaataatagaaacaattgtgacttttgtaatttgaatgaacaaaacatataacaataagtcctataatataaacattttaatttacattttcaactttttctcattttaaatttttattcagttgaaggcttgaagcgttggactactttagagaaactttacaagaacgttcttaacatctttttttctttcctttttgaatatcaaaatcagttaaaaacacttttgatctcacagaaactgatacaaagccgacggaaccgaccagattaggtcaaaaacgtaaaagacgcgcaaaaagaaaagaaaataactcataatagaatgttttagtcagaagaaaaaagtacaatatgaccaacgtaaacaaaaaagatgttgacgacataaagaaaagagctacagagacaaaggcattaaaatatcttttgtcgaaatctgaagatatttccttaagcgcgtttgcttctctgtctcctccattccattctatatcatctctgtctttgctctaagctttcctgtcaaaacaaaaattcaattccccacgtctgtcttatccacaataaaaccgaccttagcttagcttagactcattactcatttcacaaaaacagagagagaaatagagagacatactttacaggtaataattatcttgtttaattgtattatatatctctaactaaatttgggataaaaattgtctattcttgatcattcctctctgtatctctctgcttttgacaccttctcttagctgttttttcatcttttatctctgtttttaaaatcttttggctctttcgaagggtttcgagtccttttgagttctttgggcttcctcccaaatttctccacgagctcgacccctttcgtatcttccttctcatttttttgccaaatttattcgatccgtctttcactacccagctttcttgtacaaagttggcattataagaaagcattgcttatcaatttgttgcaacgaacaggtcactatcagtcaaaataaaatcattatttg

SEQ ID NO: 81 - DNA, 1164 bp, Artificial Sequence
  Synthetic oligonucleotide sequence
caaataatgattttattttgactgatagtgacctgttcgttgcaacaaattgataagcaatgcttttttataatgccaactttgtacaaaaaagcaggctttcattaaaaaaatatttttatactatataaagaaagcagaaaaacacagtttaattgcttttttcaagttccatatcatttttagtgtatatttattgcccttttataaatgaaattaggaaatttggatcaccttatggtcaatttctttatttttttagttataccacatttatactactgatgatgaaaatcgattttttgtatcgtgaacacttattaactggttttatcttgaataataaaacttccatagttattccgttattgttaggtcattgtaaaaaatcatcagcaattagtcattaaatatactatcaaagcttgtcagtcatttctcatcaattctagcaaaattattcgatatatccaaatccaaatgtcttggtttggtcatgactcatgaccgtggaaataagttcaagaatgcaaaaagtaacttatttgtgggacagaatcaaattctttgatccagttacttacgtctttccgtagccaatcaaattgaaatattttctttaggggtattcgattatggtggtcctgaagcctataacaattgttttccgataagatttgatatatataaataagggaacaatccccaaaaatgatatctagttaagatagtcgtagaatttacagaaaaggctacttatgtttttggcctgataatgcaaatactttcaaaatgttttatttgctaactagcttttagtttcgttctcgtatctaaagttagagattaacttactattcttgtattacgataacgttttgaatgaacatgtaatgatgcaagggtgtaaccaaaaatgataaaactttggggtcaatttgataatattgactaatagtgtggggcttgacaagaaccggaaactccatgatatttttgcagtctaaatatcttttcatctctcttctcttcctccactgaaatattccccacaagaactaacaacccagctttcttgtacaaagttggcattataagaaagcattgcttatcaatttgttgcaacgaacaggtcactatcagtcaaaataaaatcattatttg

SEQ ID NO: 82 - DNA, 1700 bp, Artificial Sequence
  Synthetic oligonucleotide sequence
caaataatgattttattttgactgatagtgacctgttcgttgcaacaaattgataagcaatgcttttttataatgccaactttgtacaaaaaagcaggctctgaaatttagtagagaaaaatatatgtttttttctacatacagaatagtttgaatttttaaaatcggatttgaattttaaaaatagaaatagtgtttgtaagtaaaaaatatattgtactatttaagatgtatagaaataaaatattgttctatactattttcataactgatttgtaaatcaattttaattttagtatagagcaaaatgttttaaatataaagtaatagtgttggtagtggtgatgagatagtagtttatgttacgttaatatagcattataatcaattaaatgtttttgttggaaggatactaaaccctaagtggataatatattgggaacccaaagatttcaatctaaaatttaatattctttaaccatagaaaaatagaataatatatgtttgtcatcactaccaacataacgagtagcacagcacaagatagtctcttggtagaggaaagaagtggtagtagagaacaccgggtacaccatttgggttccacaatcgagggcacaaggagacacgaactcgccacacttaactagaaattgatgtaactccaaaaaaatccaaaattttacctttgtaaatcaaaacccccaattcaatttaatcacaaaccctagacgtcaattccaaaaattaaatgtattgattccgtcgccaatacatctccattgaacgttttcagaatccgaagctttacaaaaaggagatagtaatttttgggacccaaaaagctgttggaatgttaacagctgatgagaaagtgttttttggaaagagagaagaagaagaagaaaaagagcctgtatctcaggcaaagggtagcattgtcattattacagaaaatacaaataatatcagtatctttttgtgggatggttagttacttaattataatttttttgtagattaaaaactcaaatttctcaaaattatactctcctaagtagaaaaattttacaagtttgatttcttgaaaattgatattataatttatttttctgattagggtgggaagattctttataatttttttggtttacctgaaaatgaaagaaaagattgtaagaaagatacaacaagtgtagactggatcttttaaagtccaaaccaaaagccaaaaattaggtaacctaaatatgtaagactttattttttggtttttcttattaaaacaacatttcgataattcattatgatattttttacgctatgatcctcagccttaaactttcattcgtatagaaggataatatcataatagtacaactcttttaattgccaccaatcaactttattgtctgctttcaaaaattttattttttataaaatattattcattttagctataactcaatttggaacttttattcgtcccaaataaaatatctttccaagagagatggaaaaatagcttcatatagagatattttcaacaacttgtccctctctaaactcatccaccttccaaaacagagaaggggaaaatacccagctttcttgtacaaagttggcattataagaaagcattgcttatcaatttgttgcaacgaacaggtcactatcagtcaaaataaaatcattatttg

SEQ ID NO: 83 - DNA, 1103 bp, Artificial Sequence
  Synthetic oligonucleotide sequence
caaataatgattttattttgactgatagtgacctgttcgttgcaacaaattgataagcaatgcttttttataatgccaactttgtacaaaaaagcaggctctctttctaatttcaggttataatttattaattttggcggagtaaaagtagatgaccgttacaagtctgatttattagactgtgaaattggaccgttgttatgtgggccatggcttttattaaaaaaagaagagaaggtatattatttaaattggagataatgggccgttttaaacccaattattattggtccactaaagtttttatatcctctaacttcgacgagcttgatatagttttggaccttttggtgtgaacggtcacattcaactaaattaaaaagtccaacaaacaaaatctggtcatgaaaagcttggtgtgatgtttctaataagtaaatttactgaggttaattggttggtttaacttaaatgtaatccaaactcctctccctttagagattttcagttgggaatgaaaacctttaaagcttgcaccctaaaatgacattaatggttatagatatagtttgttttcatgtttcttttttttttatattttcctttagttttttctagggttgggactaaataatcggactcggatccgagatccgatttgaaaagctggatacccaattgggatggatccgcttccggatcctgaatttttagattcagatgaatatttttttttaaactaaagaaagcatatcagcatcacatttttgtggtgatactgcttcaagaatctgtcacatatctgtccaaaagaaaagaatttgtcacatattgtataattttaatatatttattgttttagtttgaaaacaaacgtggaaaaaaacatcttacaggtgtcaggtgtgccgcgtcgtcccactcaaagcctatatcatcaattttctggctgttctaatctactcaatttatttttttattgttaatttactgaagatcggcgacccagctttcttgtacaaagttggcattataagaaagcattgcttatcaatttgttgcaacgaacaggtcactatcagtcaaaataaaatcattatttg

SEQ ID NO: 84 - DNA, 1700 bp, Artificial Sequence
  Synthetic oligonucleotide sequence
caaataatgattttattttgactgatagtgacctgttcgttgcaacaaattgataagcaatgcttttttataatgccaactttgtacaaaaaagcaggctttttaaatatctgtattttgcctccttttcattctattttgtttgatacaaacgattgtggtttgtaatgttaaaattaggaatgttattgaatgatatgtatatttcataaaaataataataataaaagtaggatgaatagtaaaattccaaggcatttcataatttacccattacatggtcaaaatttatcaatattttaaaataataataatcatccaatcaagattttgggaatagaatatcttaagaacttagtataattacatatatatatatatattcccttttaaatgtatcaaaaacaaactaagaacatacaaggaatttgatgtagtactatacaatttacatgcaaacagatgtagtactatttgatgacaaaaaaaaaaaaaaagatgtagtactattttatcttttcatcggaataattcggtcatgaagctattaattggttttaatgagaatttattataacagttgttgccacactgtcgaaatactaacgcctaacggctagttaaataattaacacgcggtgagaagtgagtgagttacacgaaccactaagaatctaatataggaagataagataagcatttcacacgtgtggtgtggacaatttaacagtgttaacacgcgcatggcatgtgatctagaaattagaacattaattttagcgttttgactttgacctttgaatcactaggcgtaggtatttacacgtgtaacaatataatttttttcaatatgtgatgatcatgggccaacgtttgtgggtaaaggtgtggtgttcgatcatgatccacttaaatttactgaattttagaattataacagcagaaggatataagtaatataccaaacttaactataatctacctctccttgtctatgtatactaaatgtctaacatgtaacacaaagctgtacaaaatttttaactctcaaattttttgaaataatgcaaagctgtaaaaatagctgtacgagaaaactgtacaataaaactgaaaataaaaaaatttgtaacgtttttgataaaagttttgtaaatgtataaccatcaaaactgtacaacttccagctttgataatgaattaccattcaaagctagagtttcgaattttttcattgtatacaaccatttgaacacaactcttttcaattatgccatacatacatttagttaataaattttaccgattaactagtactgacaaaagaaacaaagagtaattatatttttttgataaattgttttattagaaaaatacttaaaattgataaaaataaataaacccaattgatatatttgatattacaataccagatattgaaacaaataagacatgttttgtctatatacttccaactagaagatatttatttatccatatcctagatattttaatgtgtgaatctaatacattctcttatatacgaccaaatagtaaaacaatatgcctctcctgcaatttttcttcatccaatatttctacccagctttcttgtacaaagttggcattataagaaagcattgcttatcaatttgttgcaacgaacaggtcactatcagtcaaaataaaatcattatttg

SEQ ID NO: 85 - DNA, 1321 bp, Artificial Sequence
  Synthetic oligonucleotide sequence
caaataatgattttattttgactgatagtgacctgttcgttgcaacaaattgataagcaatgcttttttataatgccaactttgtacaaaaaagcaggctgaacagataagtgaagtttctctgcgatttttctaatgttgaatccatcaaactaataagtggtccctaaacctacatagtcgatggtaaaatgtcaataatgtttgaaagtttagataataccctgaaaatgacgagtcccttcgtttacttgtaataatgggtgagaactacgacacagttccatagcaactttcatatttcgagaattaaattatattccgcagcaaatgctatgtccttgtaaagctctgtttttagtctatgaccatacttgtaaaacatgttgtttttttttgtgtgaattaacagttcattcaaaataaaaataaataaataaataatcgaaaatgtaactctgtggttattgtagcttgaaaaaacgaataatcaagtgtgttgttcattctcttcgttcgttgcacactggtatagcttgttgctgtcatctactgctgactccagcgataatgaaacgatcagaaccacgaaatttactagaactcagcttatcggaacttggaaggggaccagatgagtattaggctaattcgtcgtgttgtatttttcaactaatgcgtcagtgtcgtttttattttcaactaatgcgtcagtgtcattagtttcggaaataaacgatatttgttttgtttttgtattgggtcctatatcgagcgagattggcatgtgagttgggttggctagggaaaatggtaaaatctccacattttgttttgaaaatgtgaaaaatacatttttccctacagcggggatatgaatcagtactatttataatgcaagatatgtaaatttaaaagacatcataagaaaaacaaaactacagaatttcgcttaagctttcaaagatatcgatttgaatataatggtgcatttgcggggttcagtttccacggaaccggtaaatttaaaagccaaataccttaaaagagttgtgaaacagggttacaaatatacatagtggattcgtatgaaaaagaagggaggaatgagtcctacacgtagtcacatcacatatgaaagagattgcttttgaaaatcgaatcctcttctaatattaaatctttcaagactggaggttttaaacaagaaaatcaaactcgacccagctttcttgtacaaagttggcattataagaaagcattgcttatcaatttgttgcaacgaacaggtcactatcagtcaaaataaaatcattatttg

SEQ ID NO: 86 - DNA, 1700 bp, Artificial Sequence
  Synthetic oligonucleotide sequence
caaataatgattttattttgactgatagtgacctgttcgttgcaacaaattgataagcaatgcttttttataatgccaactttgtacaaaaaagcaggctttaataaattagtaatgaacacctagactcgtatcttctaatctcaatgtttaatgaatggtaaaaataattatttaattttccgtggtcaacaatgcataatctttttatttattttgtcttcttacctttcaaaaatttctcaacttgtcaacagaaaaaataaaaatcccaataacaaaggtgacaaccgaaacagaagcacatgaccacaatgctaaagatggataaaaaaaatagagcaaaaagaaagacaaaaatttcagtagtcaagagtataattaagcacgtataatttgcaaaatttttattttatttttatgaaccgtttggtgtatatatataatccttgctttccagttttgatgatctttttgtgctactttgtatgcggttaaagattgttgtaataggcaaagaaatcttaagtaatgcctcagctgttaaacgttgtgatctcctctgttcaaaatatttcaagttgatcttacttatggtaatgctctactcgtgattgtgagtttgaactagtcactgttaaggttttctttataattgattgtcaagctaatgaataagtttgtgaatgaggttttagaaagatgcatgattggaagttgtgtttagtaaatgcttctcattacaactagaatttactatagaatcatagaacggccataaccaaacttcatgagtccggtgatattattggaatagaattcacataattttcatacttttgttacttagactgtctacataatgccacataatgaaaatttgaattagaaaacttgaatactaaatctacagatatttcaagtgacttctaatgtatgacaataagacattaagaccccttccatatcatgaccatttcaaactcgtgtcaatatgtaacccatttatcgtgggccataaacccaaaataataaatcatgtatataaacgggctattgggccataaactagtgataataagctttggggcgacgatctctggatacgtcacccctcgcgatacaattacaaccgatcaaggtcagcgaatactccgacatccttttcttgcggcccacatcggtctttagtgaatcacatgttttttctattgtcgtttcttgcgcatcaagttctgctgaggtttcttgttattttatttttgaaatttttcaacacctttaacttatctcgattttgtttaccacttaaaaaacgcccaaccaatggcatacactgaaaatgttttctaaacatttaatatttctgtggctaccaaaaagaaatcaagagttattttccatttattctgggtgaaagagaaacagagtgccacctgtcatttcctaatctggcacgtaggtttttctcatacgtattacagtgaataatacagtataccaaaggcggctcgtagcagagtttgttcgattctcttaaccacattaggtttggagtattatttgcttctctcgattgaagaagagtacctaaagaatcacccagctttcttgtacaaagttggcattataagaaagcattgcttatcaatttgttgcaacgaacaggtcactatcagtcaaaataaaatcattatttg

SEQ ID NO: 87 - DNA, 1700 bp, Artificial Sequence
  Synthetic oligonucleotide sequence
caaataatgattttattttgactgatagtgacctgttcgttgcaacaaattgataagcaatgcttttttataatgccaactttgtacaaaaaagcaggctaccgcttaatatcgtatgattagtattaaaaatcttctccagaatttcaacgttgtttttgctactcacgcattgtaccttaaatgatcttattcatcatttctaacaaaacaatttatgcattcttcgccagtagaagaacctagtagagtgctatcggcaacaactccgtcttgttcatgcggatgcaaaagaagacgtccatgcccacgtccacgtccatgtccacctccacgtccacactattcaagaaattatacagacccttgaaaaagaagaatgaagaagagaaaacaaggatcaattatgggattggtacaatatagttgagggtattgtctaatgtagtacttttgaatatgcttatagatttagacatattaaagactattttctccttttaaatcaatgaagaaaatacttgagttcaatccttcttttgcctttgcataaccgtctctcatccacaccaacaaaacaaatcccagaaccttcttttgcagaattttaaagacacacaaagcaatgaataagaacacttggtttacaataacgatcgaaactggtttacaataatgaccgaatatggtttgcaaatatagatgaattggaatttaattgattcgatctatatctaaaattaaatttcttgggttccctaaatactatcctcttagggtttagatttctattatcaaaactctcgtttaatttgagcaaattggttaatcggagaggttagggaaaacaacgttttctggtataaagagacgagagaaacggtattgatggagttaaaagtgatgatgttgatgaaatactgagtcaacgttaataaggcaagagccgactgtgagaagcaaggtttcatggttgggaattttgttgcgcaacggagaagatgaagtgaattttgttgcgcaacggatttccgcaagcttttcccgagaaaacaaagatatcatctacattctatttttgtgctgtaacttttctgaattttttgtaaacaattttttgtgatatatatatatatataaacaattttatatcattaagtatggtactctttaatgtttttaacggaacatgaccaaaactgctagtgaaagcattttgtcttaactttacaaaagaagttatcttttttttaacacaaactggttttcttcggtaaataaaaagactaagtttgtaaatttattcttagacaattatttactattattgccgactaatatgaaaatgcaaagaagtcgtatttggcattatccaaaagaagggacaaaacacttatctcttaaaacttaaattttaagccattcgtttaccaacaatgaatcttgtggctgatgtagaaaccgcgttcacttgtcaacatttagaaataatgttggctttcaaagaattaaatagaaacaaccaaaatgtatgaggttgagcgtcttctatatatttattacaagacttgcgatgaccaaaaacgcaacgaagaacgaaacccagctttcttgtacaaagttggcattataagaaagcattgcttatcaatttgttgcaacgaacaggtcactatcagtcaaaataaaatcattatttg

SEQ ID NO: 88 - DNA, 1543 bp, Artificial Sequence
  Synthetic oligonucleotide sequence
caaataatgattttattttgactgatagtgacctgttcgttgcaacaaattgataagcaatgcttttttataatgccaactttgtacaaaaaagcaggctagcttatagcgtagagatgattcactgatgttagtttcattcctatggaataacaaaatgcttttgatggtatcttcatgaacatgtacgttcacaactatctttgtagctctataactatttggtaactccggtttaagcaaagttctacactttaataatatcgacttcgttaatatatacaaatgaaaatagtcttatagatgcgagagcaaatgtttgagggtaggttaaaggaatcttgagatatggataaacgacactaagttgtgtcgtagcgagacagatccaaactacgacaagtagtaaacggagataataatatccaaaccataagaatccatgaaagcaagtagacaactgcgactttgcctcaccagtcaccatactaataattggagaggtggatctcttaggaatatttacttttataaaagatcagaggctagtcagaactcagggactaaattttattttcagtagtgacatctttaaaagacaacagagatttataaaactccacgtgtacagaagtgaaacagtctgacatgatgcctgatgctaactaactatgtaagataagacatatcttacatagttagttaccatgtaatagtaagtgataacccaaaaatgcaaaaaaaaacatccaactagaacatgtgatatgtcagtatgtgtatgagatcatgtgcacaataatattatcggtatttgtatgtctagttgtctacactctacagctcttactggaaatagattttgaggaacaagaaatagttgaatgagtcattgctatcttctagattttttttttttctgtcataatatcttctagaattttattacttgggaaagcgatatatgatatattctttttccaaaatttactaattaaaaaaaaaaaaaaaaactaagcactctgtatttattgccatattgaaaatgctctttccaccaatattccttatttgcctcaaatcattactttcggattctactgtcttgaactgtgttcatgtgtgtattccctcatcaatcaccttcaattcatattttcctatttccaaaaataaaaagatacagtatctatgtatttaattatatatcatatcaattatatcataataatcataagatcctttttatcgaaataaaaaaggaaacaaatccaatcatagcaagctttttcttttatttaataaacaaaaataaaaagcttcccgaaatggttaaaatccagaaccactaaagtcaaccaaatttgtcaaattcatccacgtcatcagttccatctataaaacgctcacgccattcgtcaagtcccaaaacaagagtccaccacccagctttcttgtacaaagttggcattataagaaagcattgcttatcaatttgttgcaacgaacaggtcactatcagtcaaaataaaatcattatttg

SEQ ID NO: 89 - DNA, 1700 bp, Artificial Sequence
  Synthetic oligonucleotide sequence
caaataatgattttattttgactgatagtgacctgttcgttgcaacaaattgataagcaatgcttttttataatgccaactttgtacaaaaaagcaggctagtaaagagaatgattattgagaatttgagattgactttatatatggtttagacacggtttagacacggtttagagcttgatttagtcataaaagagtcaagtggttgaggtgtgaacttcatatttaaagtgacgaatatcaaaagtatatagaatagacgtgtacctgcggtttaataattcctattaaaattcaccaatacattacgtgtcaaattgtatcctacagtatttagatttataatatatgcatcgctaccaaatttatggacacgttgatccactttcaaagattctgttttcggtaatagatttagaatccagatctcacctaggcttacaaaaacaaaacttacaagatccaaaatatattaaaagacgatttaaacaaaaaccaaatacattagaagcaaaatgtgaatttcgaggttctagcttaaaaataaatcgtatatactaataatggtcggttaaatggctggtcaaaaaaaaaaactgatattaagaaactagaatgtttaaaaatattttaagaaataaaagtgcaataagctaatattggccggtgttattaaaaaataacatactatttccacaatttgatctctcatttgtctttttccatctatttttatttattatgatagaaaatcatattatccaaaatatttttaaataaatgtaagagaattaaaaataaaatggtctaatcgaaggtaggtttagccgtttaggtgagaaaagagcttacttataccttttgataatgtgttcgtcaaaacagaacctataaagccaacctccaccgacccatcttttcttcttatattatttactccaagtttccttccaatttcaaaaaatataatcatctctctcactatctgaattttaaataacatacaacaaatatttttaatatatagaataaaatcaaaataagtcatcatgatctcaacatcagttgactagtcataagagaatttcataacaaaaattgaacatacacacacccaagaaaagaaaataaacttttttatttatttataatcctaagaaaaaaatggtttgtgatctaagaagttggagatagatagatgcatctccattaagagcaaaatgtttgtttttaaacagaatatgtgtccacacgaaacaacaatactctaaataggagatgcaaattgcatgtaaacactaattcagccaataacttcgaataaacaaccaaataataatacttactaattttgtttcccttcatccaaacttttctgcgtgtattattattatcatacagatttgatattaaatattacaaatatcttatttgtttgcaatattattatataagtaaagatgtatatcataatgtatgtatcctttatgtgtctctattataacgtggatcaagattctttcttatcttcatcactccacacattttcttgtcttcaaactcacacaaagaaagaaaagtctccaaagctcaaaaagcaacccagctttcttgtacaaagttggcattataagaaagcattgcttatcaatttgttgcaacgaacaggtcactatcagtcaaaataaaatcattatttg

SEQ ID NO: 90 - DNA, 1584 bp, Artificial Sequence
  Synthetic oligonucleotide sequence
caaataatgattttattttgactgatagtgacctgttcgttgcaacaaattgataagcaatgcttttttataatgccaactttgtacaaaaaagcaggctaaagaagagagaggaaggagaagagaagaaaaagaagagagacacaacggagcgccaagaggctgatgaacacgtcaccgtacacgtgtcatgatcttgaagggtttgcaaagggaacgcatatgctgagctggcaaccctagatctgcgctggacattttaaatatctgacttaaataatgattggtacacgtagtcataatcgccaccgttcatcttgagatctctacgtagacttgacgtgctgctgattttattccttttaaataatgaaaatacagaattaaactataatgtataattcatttgagatccacagatgacgaaacgtggactaccaaatcaagcatatttgtttttaccatttaatcgacggctaatattgatttcatctacggtaaaatatatctttttttaaccagaaaaaggttagagtggtccccactgtaggatctactgacttgtgtcggccgttagtggttttataaagctgacgtgtcccactgaataaggaataccgttgtggtccctacggacaacgtgggattcgacgccagctcattttttaattttttcttgaaatcttttttaaaattttagacgatgactcaatcttcgccacgtaggatccacccaataaaaaagggttaacaaaatcttatctttaatgctaaattagttgagattaatccatgttgtttaaatccgaaatgatgcatataatcttgtttcttataatcattaagatttagactgaagatctaattccaatttaagagagtcactaaaaaaagaatgaattcaatttcagacaaatccgacaaggtcaaggtgacgtgttcttgatgccaattctagtgggagccacttgacgcgtgcagttagactcccggtccaagacataaatttacgttaataccctcctttattgggttattattgggccgtagttgaattattagacccaacctttttatcctgttcttgattggcacatactttgcaaaaagttaacaaaataacttttattgcaaggcattacaagagaaatgtcaaatttggttgttgcatacatgacatcttattcatatccaatccataaattgatgtgttgttattcaaactggtcttttgatgtattgttagacatatctcatatatattgaacccttggaatcaatataatagattgggctttatttatcttttattgggcttaaagggaattgttggactaaaaaaaccattaaggctataacacactaattacacgtacaatgagagtgagagtcacggacgggatgattacaagaatcatatagcaccaaatatctcatcctcactctcacatacaaacacacattttgttcacacagagatagacacccagctttcttgtacaaagttggcattataagaaagcattgcttatcaatttgttgcaacgaacaggtcactatcagtcaaaataaaatcattatttg

SEQ ID NO: 91 - DNA, 1700 bp, Artificial Sequence
  Synthetic oligonucleotide sequence
caaataatgattttattttgactgatagtgacctgttcgttgcaacaaattgataagcaatgcttttttataatgccaactttgtacaaaaaagcaggctaagtcatacaacatcagtttttgttttgtattcagattttaagacgttcctctattgtctatttgtcttgatctgtcttgcaatggcatattctgctggaggaaacctatgtcaaggaaagatacacaaaatttgccggatgaaatagtgttaacaatatttttcttagagcatactcattgctgaactatttttttgaatgtttcaaaaccaaaatattaaatattttaatatcaaaaacaaactaactattaaaaagaagacatacggagaaaagagtctttaaacaaacgttacaaggtcttaaatgtctctaggaagacacatatctcatatcgattctttaaattcttttatttttatgaccaatggggatggtcttaggaatataatatcgcaatgttgaccaataaccaataatattaatgtaatttcgcaatatagtctattatttttatttttatcttatattttattttatttttttggtcaaatttagtctcctatcttatgtcatgcaaataatggagatgatgatgtaagataagaaagaaaattcaagtttttgctgaatttattagtatttttgaaaaaataaataaactaagaataaatgtttggtggattcaactaattgtatatttattccaatgttcaaaaaatcgttaggcggtaactaggtgttcgatagagacttagcacccagagcgagtaatcggagtctaggcgatagcacattatttcttacttttaaatatttttttacaattttctatcaaaacattggttataaaatatgaaattttaaaaatgttatctatttaaaacttattatattttcacacttttatatataaaaataaaataatttagtcttaaaactaaaaaagttgagaataattaattcataatttagaattttagtacttaaatattttgtttatcttactttgatttaagtatttcacttattcaagatgatgttatatcgaaaagaaaaaaaaaaacaaatcaggcactaaatcggtcaatttgactgatttaaccgattaatactaattttgaacgcctaaaccagtaaaccaatgtttatttaccatctaaataaattttttaaacattgatttattatgtgagagagaaaaaaaacaaactgatagaaccttttttttttttgaacaaacttgtagtcttgtagaactcaatatcaagtattaaatggccataatttcgctcttaaatttgaatgaaggaaagaaacttcctacttggtgaaaaaaaaacaaaaggaaagaaataccccactaaaacgagtaacgacatcttaatggggtcgttatttttgtctacgcggcatcaaatcgagtggacaataagaactaaaccgaagcaacgactttgaatagtcaagcgaaaaggagccaaattctctaataaataagtgaagattcatcgccaagtatcatcagcaaacctaaagctaaaagtgcctctgcatcaacccagctttcttgtacaaagttggcattataagaaagcattgcttatcaatttgttgcaacgaacaggtcactatcagtcaaaataaaatcattatttg

SEQ ID NO: 92 - DNA, 1052 bp, Artificial Sequence
  Synthetic oligonucleotide sequence
caaataatgattttattttgactgatagtgacctgttcgttgcaacaaattgataagcaatgcttttttataatgccaactttgtacaaaaaagcaggctaagtgtagattattacaagtatatatatatgactactatattttggttatatgcttatacattttggatatatgttcgggtactcattcggttcgagtttggttatggttctcgggtcttgaggttttgatcccgttcatgtatttttgccagttcgagttggggttggttctgtttactttttctagtccatgtattttgcagacctattaaaaccattctgttttttttttggaccaacaaaacccatccgtttttagatacgaaaataaaattttattaaaaccattatttttcttggaccatcaaaacccatccgtttaaagatacgaaatgaaattcgattgataaatacaaaataaagttcaccaaacttaaataaaaaggcatagatgggaccaatgagaaagaaatttcttttctcctcaatttccccaaaaatatataaaccttaagtttacttttttgttgcaaggaaaaacattaatctttttcaactttctaaaaacaatcatttcaaacgttaaaggaacctcctcctttctttacgcgtttgcaatataacccaagaagaccgcttgtttgtacaactttccaaaaaccaaacagtagtgtaataaacctctgacttcttttttcttctctatttttgtgggtgataatcaattcactcggtttgaaatttcgtccacttttcaaagatgagtgaatgaaaaagccacgaaactttccatttcttcctctgtgtataactctcactgagtacgacttgccattttctcatccaaaaaaaatgtttatccaaatacatatttgtgaactttgcttttaaaccactcaagattcttccccacccagctttcttgtacaaagttggcattataagaaagcattgcttatcaatttgttgcaacgaacaggtcactatcagtcaaaataaaatcattatttg

SEQ ID NO: 93 - DNA, 1700 bp, Artificial Sequence
  Synthetic oligonucleotide sequence
caaataatgattttattttgactgatagtgacctgttcgttgcaacaaattgataagcaatgcttttttataatgccaactttgtacaaaaaagcaggctatttcaatcatttatagctgaaggtgtaccatatagatagatagggacaccagcaatttttacatataaaaaagaaaaaaatatcaaacgatttacaatgtatcatgtcgcgattgggtcttgctgcctcaagaatagggctgatatctcgttttgtccaatcaaagaaaaaacacgtcatattcttattttgatgatttatatattagcattatccaaagtccaaagattataaactgagattcatcttctcgcccttgcacattgtagcaacgtgtgaggcatgtgcgatgcctatacctacaattcacatgtgatccggtatattaaaatatacatgatttatggatacactcgaatacttctccgatattcatttcgcggaaagttgcatatgatccactatctcctatatatttgttatataacacatggcaaatctctctatatatattttttaaatacacatatatccaaaataggcttaactataacacaaagacttttgtttactgtatattagtaagaagtaaatgtattttttaatattatgataaagtttgtgaaatcaccatttgcaatagccatatagggtcgtgttttaattttacagtttgtattgttataattcgattccaaggttgagaatatgtgtgtactattagactatacaaataataattcgttgacgatattgaatatttactaattataggaagagaaaattatttactaactatagtacgatatatttcttctatatgtgtttttaacgtttttttttttttaaatttaagtcttaactttacttctcatttttaatcaaaaggaaaaaaataccaatcaatttttcctaacacagtttacttatcattttcatttgaaatgtgttcactttctgataaaatgctaatcctacaatcaaatacaccattgtcgtgataacacgtgtacggctctaaagcaatcagaacaatcattggacagtttttacaccgtcagataagtacctatccacttgctgactcagccggataaaccctaaaccggaagtttgccccaccgtcaaaattggaagaaaccggacaaaagagaatgtaaagactaagaagtaagaacccatcggacgtcgtaagaaggttaattaacacgtggaaacagctggtcagagttatccggtaacttatccggttacaagtaaaaaaataatttgttcccatacacgactccttcagaaccaaacgcgacatcacggcgccgtttagtgtctataaatagagcaatcggtcgtagaaaaccaagacatcaaaaacacgaatatcgatagtacacttctacgtgcaattttctcctttctcttcctggacatctgtctgtttattacattttcttgtaatctctttttggggttttacaatatctatcccctaaagtttcggaaaattctgtttttctgttctcattcttcgtgatctttttcactttcttcaaaaaaaaaacacccagctttcttgtacaaagttggcattataagaaagcattgcttatcaatttgttgcaacgaacaggtcactatcagtcaaaataaaatcattatttg

SEQ ID NO: 94 - DNA, 630 bp, Artificial Sequence
  Synthetic oligonucleotide sequence
caaataatgattttattttgactgatagtgacctgttcgttgcaacaaattgatgagcaatgcttttttataatgccaactttgtataataaagttgtattcttctgtgcaatagcaacaatggaagattgggttcggtttcagttgttgccataccgtataaatgtgttcttaaagagagtctttttgtcgaggcttttcttcagttgggatgtatatgttttattaaggtgatgagtagtgatttggtgtgtcttttcaaatgctttgtggagtctgtttttccttataaaaatttattctaaatctggtttgtattttgggggtcttctttgctctttcttcattaacagaatactaattataagcttttcatatacaaaccttgaaaggaattttcatcagttactaattcgatttcagagaaatgaatcattcaaaacacttgattagagaaatgcttcttgaaccgggtcggtttaacgaaatccactggctggaaaaattatgcttttatatatataagaagcacccagctttcttgtacaaagttggcattataagaaagcattgcttatcaatttgttgcaacgaacaggtcactatcagtcaaaataaaatcattatttg

SEQ ID NO: 95 - DNA, 1073 bp, Artificial Sequence
  Synthetic oligonucleotide sequence
caaataatgattttattttgactgatagtgacctgttcgttgcaacaaattgatgagcaatgcttttttataatgccaactttgtataataaagttgtactctttgtgctgatgttaaaccggtgtaatacaatgaaaactcaaaggtccggtttaatcaggaaaatatcttctgcacacattgaagtagattgatgctaatgtgtatcaaaaggtccaaagccgcattattgttgcaaaatgcggattgcaaagaagataatagtggtttgtgtccttaggtttagagctaaaaaaggtgtgaaaatgagacttgtgagcgaatcaattattgatcaatggttacgagagatgtcacgctcaactgtcgttatgtctttgacagttgcaatttgcccataaaactttcttgctagaggttatccgcaaacaaaccactaattcaacctcttagctacaatatcttcatgtacgtttttgtcgaaatctcaaaatccatctcctacaatatcatgtttactaattacactttgatggatagccacaaaattttggaaagaagagaatcaattatataacaaaagaatttgcacataagccataataacaaaaataagaaaaaaggaaaagaaaagaatacacagacagaacgaaagcagtatctcctgaatattcaccttttaggattgaaagcatcaaaaagaaaaagaaggaagatcttgacataaaagaaagaaaaaaacaccttaaaagattaaaaacattaccatcaaacataggaatatataaaagcacagcaacctttagaaccaaatccacatgattctgtccactctttttacccatctcttctcatataagttttggctgaagatatatataaatattatacggtttctttctctcttgtcctccttacttaatgcaagagatatgatgagtcttgagagtaatgatcgtaccgcagagtttcacccagctttcttgtacaaagttggcattataagaaagcattgcttatcaatttgttgcaacgaacaggtcactatcagtcaaaataaaatcattatttg

SEQ ID NO: 96 - DNA, 445 bp, Artificial Sequence
  Synthetic oligonucleotide sequence
caaataatgattttattttgactgatagtgacctgttcgttgcaacaaattgatgagcaatgcttttttataatgccaactttgtataataaagttgtagattcatagatcatatatatgtacatcatatccctctttagagcaggtactcgtgttcacctgcaaatgtaacaaagaacattatactatacaacaaatatacacattgaattatacctgtataaccaacataggtcaagattacatcatacgtgggctaggcccattttatattggcccaataagtgagtgactaaatcctttcgttcccaaatatatctccaccgatcaagagattcatcttccacccagctttcttgtacaaagttggcattataagaaagcattgcttatcaatttgttgcaacgaacaggtcactatcagtcaaaataaaatcattatttg

SEQ ID NO: 97 - DNA, 700 bp, Artificial Sequence
  Synthetic oligonucleotide sequence
caaataatgattttattttgactgatagtgacctgttcgttgcaacaaattgatgagcaatgcttttttataatgccaactttgtataataaagttgtaaggttgaagaataagaattaaaaaattgtatttaaactataaaatatgcatacataataaattttgatcgtttttaactaataaaacatatggtgtatcatttcaatctcacatgaattaaatcttggtgtgtatagactatacagtatagtagtttgttttgtaaaccgaaatcagaacactggctgctggccggtttacttaatttatgaatctatatatacatttttgcagtcattttgtgaaataaatcctgtagttgggacttatttacaatggctgccactggattttaatgtttgtttttgataattagaaaaaaaatcttcgaattaaatattttacatttaacaatcttccctaaatctctccacattaactacacggttagttactaaaattaaacttccaaaatatttaatatcatttaattactacaaaattatcatttttgatattgtttttctccatgactataacaattcgactataatcatcaacacccagctttcttgtacaaagttggcattataagaaagcattgcttatcaatttgttgcaacgaacaggtcactatcagtcaaaataaaatcattatttg

SEQ ID NO: 98 - DNA, 374 bp, Artificial Sequence
  Synthetic oligonucleotide sequence
caaataatgattttattttgactgatagtgacctgttcgttgcaacaaattgatgagcaatgcttttttataatgccaactttgtataataaagttgtaaaccgaatatctcttcgaatcacattcatatatatagagtcttgagagtatacacacttgaaaccgtttgtacatacatatacataccattgtgctatgttactcccaggttttgataccttagttttttttacctgcaaatcgatcaaaacccgattttctttgcggagttaccacccagctttcttgtacaaagttggcattataagaaagcattgcttatcaatttgttgcaacgaacaggtcactatcagtcaaaataaaatcattatttg

SEQ ID NO: 99 - DNA, 700 bp, Artificial Sequence
  Synthetic oligonucleotide sequence
caaataatgattttattttgactgatagtgacctgttcgttgcaacaaattgatgagcaatgcttttttataatgccaactttgtataataaagttgtaaattgggctaatgattaacatgaatatttttcataagtctaaaaatatgttattctctctctttcaaaatacattgaatttggtattagttacttttatttatttaagtttggtgttaactttagtactttaagccagaattttctttgaaaatctaaacgaccttattttgagaattctttaagaaagtaagtcttgaaacaattcgaacaagcttaagcttagtttcagcttcttattcttccttagtaatttctcttgatcccgtggcaagtagatttattcctttattgtacgtattgatgatgcctcgatcacttagatgagtccttgttaaagggaaccaaacttcaaatccgactatcattttcttattttctggacaaaaagtctaaactcatatattacagatgtttaaaattttgaatagttttgtctttaacgaggagctacactagtaatggaagcttcgtcgattgaaaagaggtcagatgtatccacacccagctttcttgtacaaagttggcattataagaaagcattgcttatcaatttgttgcaacgaacaggtcactatcagtcaaaataaaatcattatttg

SEQ ID NO: 100 - DNA, 700 bp, Artificial Sequence
  Synthetic oligonucleotide sequence
caaataatgattttattttgactgatagtgacctgttcgttgcaacaaattgatgagcaatgcttttttataatgccaactttgtataataaagttgtatccatatcccctccacttcgccacgtgcttcttcttctctatgtctctatcttgttcactttatgacctctaatcagttgaaatcatatgttgtttacttggaacaattcaatgaaattcagcattttagaaagacagggtattgactttgaaattgaatcatctggtttgactgatagtcaatttaaatggtattaacttttgactaagcacagttagttttcaacatttttaaaattgaacaattaaattgaaaaaacctataagctatggttaaagattgattagtaaaaaatgtttgcttttgcataagagtagaaaaagttttatgggtttaatattttttgtatcaaacatttgaaatatttcttgtatatctgtaaaattattttaaaatatctattataagatttatatgagttttccacttccacatgattcatgtgatacagaaagtgcatctcaaaacttctagagtttccctaccaaaaaaaaaaaaccacccagctttcttgtacaaagttggcattataagaaagcattgcttatcaatttgttgcaacgaacaggtcactatcagtcaaaataaaatcattatttg

SEQ ID NO: 101 - DNA, 700 bp, Artificial Sequence
  Synthetic oligonucleotide sequence
caaataatgattttattttgactgatagtgacctgttcgttgcaacaaattgatgagcaatgcttttttataatgccaactttgtataataaagttgtatactttgagtttgagttactctgtgttcgaattttaaagtatatgtggttttctgttttagtttcgtgtctcaactctcaagtgtagaggaatgttataaactactatgcaatgaaggaactaatacttatgatggtattttactaattatgttattattcataattccatgcattagagccaattgtcgcattttttttctttcagaattcttcaaacttgtcaaatcgaaatctcttctttagaagcgactagattagtttttttcttcaaaagaaattctctactgaatttataatttaaagagttcacgagctgcctactaaaatatgaaaaatatttatgaatccagcaatacaaattgtagctttgcaatacaagaaagaacaacttttcatagagatcaaaaacgctagataaaaaaaaaacggggaagactaactagtaagtaccacgagtataacacattttttggatttagtttctatgattgctttcgccacccagctttcttgtacaaagttggcattataagaaagcattgcttatcaatttgttgcaacgaacaggtcactatcagtcaaaataaaatcattatttg

SEQ ID NO: 102 - DNA, 684 bp, Artificial Sequence
  Synthetic oligonucleotide sequence
caaataatgattttattttgactgatagtgacctgttcgttgcaacaaattgatgagcaatgcttttttataatgccaactttgtataataaagttgtatttgttatgtaacttattcttctaataaaaaactccgctagttcatatcttgttaagtatttggttagcctaagaaattatatagcttgaggtttcacattttcaatattttttaaaaataatttgggtcaatattgatgttggaaatgaaatcaacggttgaattattgtcgtgtgctgcttgcaccatggtccatgctagatggaccgaccactatttttccaaacagtgcctatcctatcaagtagatattttctgaatacgtagataattgtagaatacaagaaaagaaatatcctctgtggaataaatgaataatatacttttgtcagaaacgttacaagttaaaattccacgactgattgccacgtgtaagcttatctcaaaagggccctacagtaccatgatgacgtcatctcttacaccactctctgaaaaattcctccgccttataaaaaaactcgattatcgtcttcacttagtcacccagctttcttgtacaaagttggcattataagaaagcattgcttatcaatttgttgcaacgaacaggtcactatcagtcaaaataaaatcattatttg

SEQ ID NO: 103 - DNA, 700 bp, Artificial Sequence
  Synthetic oligonucleotide sequence
caaataatgattttattttgactgatagtgacctgttcgttgcaacaaattgatgagcaatgcttttttataatgccaactttgtataataaagttgtattaacactaatttttgttttattatggcaataattaattgcataaaagttatgtaaagtgagtttaattaggattagagagatcttttaaagtttttctctcttttctccttgttgtaatccagtgtatttaatcaaatctcagatggagttcaaatttcgagatcatgtttgtttgttttccaacaaatctaatttacaagaagagtagattattgattagtgcttataactcttttgcagtcaagtttctggatcatagacttattatataagttatcgtacaaacatacctttatatatgtacttacagtactattagtagccaactatcttaacccaaattttagctacctaaaatatctaaaaggcaacaaatgaagtaagatccatagtcgattgatctaaaggcaacaattttctggatgcctactcgatggatctaaaaggtaacaatgttcacattttcaagattacttacacttatgataatgagattagcacccagctttcttgtacaaagttggcattataagaaagcattgcttatcaatttgttgcaacgaacaggtcactatcagtcaaaataaaatcattatttg

SEQ ID NO: 104 - DNA, 700 bp, Artificial Sequence
  Synthetic oligonucleotide sequence
caaataatgattttattttgactgatagtgacctgttcgttgcaacaaattgatgagcaatgcttttttataatgccaactttgtataataaagttgtactttgtataagatcattagttgttaattttttaaatatgaatttctaaactatccaccaactaagcatgttgtgacaagcaaaagtatatagataattagatattatatgtatatgtttaaaattgcgtaatatgctttacaggtcgattgttctcctaatcatttgattcttcttaatttattggattacgaaatgacatttctttgtcacctttttcgtgcatatcagatttgtttaaagtttacgtgacgaatgacgattgatcttttatcttgttgtgccgccgtattttgtatggacattacttgtaatactatatatatcagctatgcgttaactatactcatcaaataccacatatgatttattatatcaaagtacttattaataaataattaaattaaccttatattcaattgcacttgggtgagaaagccgttagaaaaaactcccgctatagaagaaatgtggtagatttgaaccgaaattaaatattttcacccagctttcttgtacaaagttggcattataagaaagcattgcttatcaatttgttgcaacgaacaggtcactatcagtcaaaataaaatcattatttg

SEQ ID NO: 105 - DNA, 700 bp, Artificial Sequence
  Synthetic oligonucleotide sequence
caaataatgattttattttgactgatagtgacctgttcgttgcaacaaattgatgagcaatgcttttttataatgccaactttgtataataaagttgtatatgacgtgattatggtgaaatttttaataaattcgtgtggcaatcaattaaagagagaataacaatatattaattggagcaaatcgcctttcttataaagtttcctcttaccaagtgtgtgtgagttgagtaaataagaaaacccttttataagcccgcaaaacccatacaaacaggaatgaaccgccaatgtccctaagaatatggactcctagcagctaaacgtgcctagtcaagccccgtggagccgcgtaggcagagagggggagataaaagagaagaggagagtgttgcatggaattacattttagttgatttttggaaggatttggtccaccctgtcttcatcaagtcacatacaccaccagttatcattttgtattcataattttaagaaattgatcttttgtcttgatctgtcttgcaatgacatatcctactggagacttgtatcaggaaaattcaaaattgccggagaaaatagtgttaagctttttttcacccagctttcttgtacaaagttggcattataagaaagcattgcttatcaatttgttgcaacgaacaggtcactatcagtcaaaataaaatcattatttg

SEQ ID NO: 106 - DNA, 462 bp, Artificial Sequence
  Synthetic oligonucleotide sequence
caaataatgattttattttgactgatagtgacctgttcgttgcaacaaattgatgagcaatgcttttttataatgccaactttgtataataaagttgtaaaagaaaaagaaaaatgaatcatcagtctcttttgatcgcttcatgaggttttttattgtatacgaaaccttcagaaaaaatacatgtatccatgcttgttgttgacgtcaaagttcagttcatcaaaaagatcttatctaatgagaaatgctttttatagaagtgtaccttaaaaccttgaattaaaaaaaacattgtattgtgttaagcacaaaaactgtggagggatacataatttgaagagcctctgatagtattaaccacccagctttcttgtacaaagttggcattataagaaagcattgcttatcaatttgttgcaacgaacaggtcactatcagtcaaaataaaatcattatttg

SEQ ID NO: 107 - DNA, 700 bp, Artificial Sequence
  Synthetic oligonucleotide sequence
caaataatgattttattttgactgatagtgacctgttcgttgcaacaaattgatgagcaatgcttttttataatgccaactttgtataataaagttgtacttcgaaggagaaatggatgaaatatgtgttatatcttcccaatgggtgaagtgttttgtatgattttaaaaataagaatgtgatcctttttttttcctatgaagatctgaatgtataatctatcttgtaaaaatttgtttctttgtaagatttgaatgtaccgcttttacgtagatcgatgtacatcaatcttataagtttcaattatgtattatattatgtcgatttgccaaaaataaatctaaaacctcaaaaataaatctggttttagatacttgtatatagtactaactcgatgaaaaaatgattttttttttgttactgaatctgaaatataattataaaataaaaatactaattattaataaatcaatttaccaaaaattttaaattttgataacaaaaaattaaatctagtcaatttttaaaagttcttttttgatatttcaaatatccgaattcgaaataattccaaccgaattcatagtcgactcaaacacacccagctttcttgtacaaagttggcattataagaaagcattgcttatcaatttgttgcaacgaacaggtcactatcagtcaaaataaaatcattatttg

SEQ ID NO: 108 - DNA, 331 bp, Artificial Sequence
  Synthetic oligonucleotide sequence
gattcatagtgactggatatgttgtgttttacagtattatgtagtctgttttttatgcaaaatctaatttaatatattgatatttatatcattttacgtttctcgttcaacttttctatacaaagttgtaatggactacaaagaccatgacggtgattataaagatcatgacatcgattacaaggatgacgatgacaagtgaacaactttgtataataaagttgaacgagaaacgtaaaatgatataaatatcaatatattaaattagattttgcataaaaaacagactacataatactgtaaaacacaacatatccagtcactatgaatc

SEQ ID NO: 109 - DNA, 310 bp, Artificial Sequence
  Synthetic oligonucleotide sequence
gattcatagtgactggatatgttgtgttttacagtattatgtagtctgttttttatgcaaaatctaatttaatatattgatatttatatcattttacgtttctcgttcaacttttctatacaaagttgtaatggaaggaaagcctattcctaatcctcttcttggacttgattctacttgaacaactttgtataataaagttgaacgagaaacgtaaaatgatataaatatcaatatattaaattagattttgcataaaaaacagactacataatactgtaaaacacaacatatccagtcactatgaatc

SEQ ID NO: 110 - DNA, 385 bp, Artificial Sequence
  Synthetic oligonucleotide sequence
gattcatagtgactggatatgttgtgttttacagtattatgtagtctgttttttatgcaaaatctaatttaatatattgatatttatatcattttacgtttctcgttcaacttttctatacaaagttgtaatgggacttattaacatcttttacccatacgatgttcctgattatgctggatacccatacgatgttcctgattatgctggatcttacccatacgatgttcctgattatgctgctcagtgctcttagacaactttgtataataaagttgaacgagaaacgtaaaatgatataaatatcaatatattaaattagattttgcataaaaaacagactacataatactgtaaaacacaacatatccagtcactatgaatc

SEQ ID NO: 111 - DNA, 424 bp, Artificial Sequence
  Synthetic oligonucleotide sequence
gattcatagtgactggatatgttgtgttttacagtattatgtagtctgttttttatgcaaaatctaatttaatatattgatatttatatcattttacgtttctcgttcaacttttctatacaaagttgtaatggaacaaaagcttatttctgaggaagatcttaacggtgaacaaaagcttatttctgaggaagatcttaacggacttgatggagaacaaaagcttatttctgaggaagatcttaacggagaacaaaagcttatttctgaggaagatcttaacggttctgcttagacaactttgtataataaagttgaacgagaaacgtaaaatgatataaatatcaatatattaaattagattttgcataaaaaacagactacataatactgtaaaacacaacatatccagtcactatgaatc

SEQ ID NO: 112 - DNA, 283 bp, Artificial Sequence
  Synthetic oligonucleotide sequence
gattcatagtgactggatatgttgtgttttacagtattatgtagtctgttttttatgcaaaatctaatttaatatattgatatttatatcattttacgtttctcgttcaacttttctatacaaagttgtaatggatacttatagatatatttgaacaactttgtataataaagttgaacgagaaacgtaaaatgatataaatatcaatatattaaattagattttgcataaaaaacagactacataatactgtaaaacacaacatatccagtcactatgaatc

SEQ ID NO: 113 - DNA, 292 bp, Artificial Sequence
  Synthetic oligonucleotide sequence
gattcatagtgactggatatgttgtgttttacagtattatgtagtctgttttttatgcaaaatctaatttaatatattgatatttatatcattttacgtttctcgttcaacttttctatacaaagttgtaatgtcttggaaagatgcttctggatggtcttgaacaactttgtataataaagttgaacgagaaacgtaaaatgatataaatatcaatatattaaattagattttgcataaaaaacagactacataatactgtaaaacacaacatatccagtcactatgaatc

SEQ ID NO: 114 - DNA, 391 bp, Artificial Sequence
  Synthetic oligonucleotide sequence
gattcatagtgactggatatgttgtgttttacagtattatgtagtctgttttttatgcaaaatctaatttaatatattgatatttatatcattttacgtttctcgttcaacttttctatacaaagttgtaatggctggatctactggagcttcttggtctcatcctcaatttgaaaagggaggaggttctggaggtggatctggtggaggatcatggtctcatccacagttcgaaaagggagctggatctaggcctatttgaacaactttgtataataaagttgaacgagaaacgtaaaatgatataaatatcaatatattaaattagattttgcataaaaaacagactacataatactgtaaaacacaacatatccagtcactatgaatc

SEQ ID NO: 115 - DNA, 289 bp, Artificial Sequence
  Synthetic oligonucleotide sequence
gattcatagtgactggatatgttgtgttttacagtattatgtagtctgttttttatgcaaaatctaatttaatatattgatatttatatcattttacgtttctcgttcaacttttctatacaaagttgtaatgtctcatcatcatcatcatcatgcttagacaactttgtataataaagttgaacgagaaacgtaaaatgatataaatatcaatatattaaattagattttgcataaaaaacagactacataatactgtaaaacacaacatatccagtcactatgaatc

SEQ ID NO: 116 - DNA, 298 bp, Artificial Sequence
  Synthetic oligonucleotide sequence
gattcatagtgactggatatgttgtgttttacagtattatgtagtctgttttttatgcaaaatctaatttaatatattgatatttatatcattttacgtttctcgttcaacttttctatacaaagttgtaatggcttctatgactggtggacagcaaatgggtgcttagacaactttgtataataaagttgaacgagaaacgtaaaatgatataaatatcaatatattaaattagattttgcataaaaaacagactacataatactgtaaaacacaacatatccagtcactatgaatc

SEQ ID NO: 117 - DNA, 80 bp, Artificial Sequence
  Synthesized DNA sequence upstream of position binding vector
aagcttattaccctgttatccctaaccggtagataagttgatttagccataaaatattgtttccgtgacccccctgcagg

SEQ ID NO: 118 - DNA, 80 bp, Artificial Sequence
  Synthesized DNA sequence upstream of position binding vector
aagcttattaccctgttatccctaaccggttctgagtcacggcttcattggcattccgtacaacgaacgtcccctgcagg

SEQ ID NO: 119 - DNA, 80 bp, Artificial Sequence
  Synthesized DNA sequence upstream of position binding vector
aagcttattaccctgttatccctaaccggtcctcagagagcctatagcggtaaaacaacaccatgcatcccccctgcagg

SEQ ID NO: 120 - DNA, 80 bp, Artificial Sequence
  Synthesized DNA sequence upstream of position binding vector
aagcttattaccctgttatccctaaccggtcgcagtcgcttcctgtaaatagagcattaaattccatagtcccctgcagg

SEQ ID NO: 121 - DNA, 80 bp, Artificial Sequence
  Synthesized DNA sequence upstream of position binding vector
aagcttattaccctgttatccctaaccggtacttaatcgaaaaaaaaacagacagccatgtgctcttcggcccctgcagg

SEQ ID NO: 122 - DNA, 80 bp, Artificial Sequence
  Synthesized DNA sequence upstream of position binding vector
aagcttattaccctgttatccctaaccggtggacatgattatggaacacacacacgctagccgcccagttcccctgcagg

SEQ ID NO: 123 - DNA, 83 bp, Artificial Sequence
  Synthesized DNA sequence down stream of position binding vector
ggtaccggtgcgtttttatgcttgtagtattgtataatgtttttaagatccttaattaatagggataacagggtaatactagt

SEQ ID NO: 124 - DNA, 83 bp, Artificial Sequence
  Synthesized DNA sequence down stream of position binding vector
ggtaccggtctaatacccaatctctcgtcttatccagatgttttatacgccttaattaatagggataacagggtaatactagt

SEQ ID NO: 125 - DNA, 83 bp, Artificial Sequence
  Synthesized DNA sequence down stream of position binding vector
ggtaccggtgaattcccttatgtgagtgtaaaaggcaggcgagtttgtcccttaattaatagggataacagggtaatactagt

SEQ ID NO: 126 - DNA, 83 bp, Artificial Sequence
  Synthesized DNA sequence down stream of position binding vector
ggtaccggttgcttgcaaaagcagtaattggaaagcactctcaaagaatccttaattaatagggataacagggtaatactagt

SEQ ID NO: 127 - DNA, 83 bp, Artificial Sequence
  Synthesized DNA sequence down stream of position binding vector
ggtaccggtagataagttgatttagccataaaatattgtttccgtgaccccttaattaatagggataacagggtaatactagt

SEQ ID NO: 128 - DNA, 83 bp, Artificial Sequence
  Synthesized DNA sequence down stream of position binding vector
ggtaccggttctgagtcacggcttcattggcattccgtacaacgaacgtccttaattaatagggataacagggtaatactagt

SEQ ID NO: 129 - DNA, 83 bp, Artificial Sequence
  Synthesized DNA sequence down stream of position binding vector
ggtaccggtcctcagagagcctatagcggtaaaacaacaccatgcatccccttaattaatagggataacagggtaatactagt

SEQ ID NO: 130 - DNA, 83 bp, Artificial Sequence
  Synthesized DNA sequence down stream of position binding vector
ggtaccggtcgcagtcgcttcctgtaaatagagcattaaattccatagtccttaattaatagggataacagggtaatactagt

SEQ ID NO: 131 - DNA, 83 bp, Artificial Sequence
  Synthesized DNA sequence down stream of position binding vector
ggtaccggtacttaatcgaaaaaaaaacagacagccatgtgctcttcggccttaattaatagggataacagggtaatactagt

SEQ ID NO: 132 - DNA, 83 bp, Artificial Sequence
  Synthesized DNA sequence down stream of position binding vector
ggtaccggtggacatgattatggaacacacacacgctagccgcccagttccttaattaatagggataacagggtaatactagt

SEQ ID NO: 133 - DNA, 83 bp, Artificial Sequence
  Synthesized DNA sequence down stream of position binding vector
ggtaccggtgagcccaaacagcgaaatacctgagcgaacaaatactactccttaattaatagggataacagggtaatactagt

SEQ ID NO: 134 - DNA, 128 bp, Artificial Sequence
  Synthesized DNA sequence up stream of adapter vector
aagcttggtgcgtttttatgcttgtagtattgtataatgtttttaagatccttaattaaggtgcgtttttatgcttgtagtattgtataatgtttttaagatcctagggataacagggtaatgagctc

SEQ ID NO: 135 - DNA, 128 bp, Artificial Sequence
  Synthesized DNA sequence up stream of adapter vector
aagcttggtctaatacccaatctctcgtcttatccagatgttttatacgccttaattaaggtgcgtttttatgcttgtagtattgtataatgtttttaagatcctagggataacagggtaatgagctc

SEQ ID NO: 136 - DNA, 128 bp, Artificial Sequence
  Synthesized DNA sequence up stream of adapter vector
aagcttggtgaattcccttatgtgagtgtaaaaggcaggcgagtttgtcccttaattaaggtgcgtttttatgcttgtagtattgtataatgtttttaagatcctagggataacagggtaatgagctc

SEQ ID NO: 137 - DNA, 128 bp, Artificial Sequence
  Synthesized DNA sequence up stream of adapter vector
aagcttggttgcttgcaaaagcagtaattggaaagcactctcaaagaatccttaattaaggtgcgtttttatgcttgtagtattgtataatgtttttaagatcctagggataacagggtaatgagctc

SEQ ID NO: 138 - DNA, 128 bp, Artificial Sequence
  Synthesized DNA sequence up stream of adapter vector
aagcttggtagataagttgatttagccataaaatattgtttccgtgaccccttaattaaggtgcgtttttatgcttgtagtattgtataatgtttttaagatcctagggataacagggtaatgagctc

SEQ ID NO: 139 - DNA, 128 bp, Artificial Sequence
  Synthesized DNA sequence up stream of adapter vector
aagcttggttctgagtcacggcttcattggcattccgtacaacgaacgtccttaattaaggtgcgtttttatgcttgtagtattgtataatgtttttaagatcctagggataacagggtaatgagctc

SEQ ID NO: 140 - DNA, 128 bp, Artificial Sequence
  Synthesized DNA sequence up stream of adapter vector
aagcttggtcctcagagagcctatagcggtaaaacaacaccatgcatccccttaattaaggtgcgtttttatgcttgtagtattgtataatgtttttaagatcctagggataacagggtaatgagctc

SEQ ID NO: 141 - DNA, 128 bp, Artificial Sequence
  Synthesized DNA sequence up stream of adapter vector
aagcttggtcgcagtcgcttcctgtaaatagagcattaaattccatagtccttaattaaggtgcgtttttatgcttgtagtattgtataatgtttttaagatcctagggataacagggtaatgagctc

SEQ ID NO: 142 - DNA, 128 bp, Artificial Sequence
  Synthesized DNA sequence up stream of adapter vector
aagcttggtacttaatcgaaaaaaaaacagacagccatgtgctcttcggccttaattaaggtgcgtttttatgcttgtagtattgtataatgtttttaagatcctagggataacagggtaatgagctc

SEQ ID NO: 143 - DNA, 128 bp, Artificial Sequence
  Synthesized DNA sequence up stream of adapter vector
aagcttggtggacatgattatggaacacacacacgctagccgcccagttccttaattaaggtgcgtttttatgcttgtagtattgtataatgtttttaagatcctagggataacagggtaatgagctc

SEQ ID NO: 144 - DNA, 128 bp, Artificial Sequence
  Synthesized DNA sequence up stream of adapter vector
aagcttggtgagcccaaacagcgaaatacctgagcgaacaaatactactccttaattaaggtgcgtttttatgcttgtagtattgtataatgtttttaagatcctagggataacagggtaatgagctc

SEQ ID NO: 145 - DNA, 59 bp, Artificial Sequence
  Synthesized DNA sequence down stream of adapter vector
gcggccgcggtgcgtttttatgcttgtagtattgtataatgtttttaagatcctctaga

SEQ ID NO: 146 - DNA, 128 bp, Artificial Sequence
  A synthesized DNA sequences positioned in ?carrier vector
aagctttagggataacagggtaatggtttaccgagctcttattggttttcaaacttcattgactgtgccttaattaaggtatcactagtattacagaggtaagttataacagtcgcctaaccgaattc

SEQ ID NO: 147 - DNA, 23 bp, Artificial Sequence
  Synthetic oligonucleotide primer
atgacaggaggctttaggaaatg

SEQ ID NO: 148 - DNA, 24 bp, Artificial Sequence
  Synthetic oligonucleotide primer
ttatactgcggtagaaggtgagag

SEQ ID NO: 149 - DNA, 24 bp, Artificial Sequence
  Synthetic oligonucleotide primer
atgtcgactgtgaagctagatagg

SEQ ID NO: 150 - DNA, 22 bp, Artificial Sequence
  Synthetic oligonucleotide primer
ctaaccagtgttctgcagacca

SEQ ID NO: 151 - DNA, 24 bp, Artificial Sequence
  Synthetic oligonucleotide primer
atgtgtgagagcttcaagagagaa

SEQ ID NO: 152 - DNA, 20 bp, Artificial Sequence
  Synthetic oligonucleotide primer
ttacatgttggccaatcctc

SEQ ID NO: 153 - DNA, 19 bp, Artificial Sequence
  Synthetic oligonucleotide primer
atggccgttgaacctcttc

SEQ ID NO: 154 - DNA, 22 bp, Artificial Sequence
  Synthetic oligonucleotide primer
ttaagtcaggcatgagtaggcc

SEQ ID NO: 155 - DNA, 20 bp, Artificial Sequence
  Synthetic oligonucleotide primer
atgggtggtagcaatgcatt

SEQ ID NO: 156 - DNA, 20 bp, Artificial Sequence
  Synthetic oligonucleotide primer
tcaacggaaactccggtaag

SEQ ID NO: 157 - DNA, 19 bp, Artificial Sequence
  Synthetic oligonucleotide primer
atggcgtcagctttcaagg

SEQ ID NO: 158 - DNA, 20 bp, Artificial Sequence
  Synthetic oligonucleotide primer
tcaaacgacttgagctgctg

SEQ ID NO: 159 - DNA, 22 bp, Artificial Sequence
  Synthetic oligonucleotide primer
atgttagcttgtgctagcctcg

SEQ ID NO: 160 - DNA, 25 bp, Artificial Sequence
  Synthetic oligonucleotide primer
ctaatagcgcttagatattctgggc

SEQ ID NO: 161 - DNA, 25 bp, Artificial Sequence
  Synthetic oligonucleotide primer
atggcggggaaattcggatcactga

SEQ ID NO: 162 - DNA, 28 bp, Artificial Sequence
  Synthetic oligonucleotide primer
atttctgaactgaagggacaccatcaac

SEQ ID NO: 163 - DNA, 23 bp, Artificial Sequence
  Synthetic oligonucleotide primer
atgaatcataatcacgatcccaa

SEQ ID NO: 164 - DNA, 26 bp, Artificial Sequence
  Synthetic oligonucleotide primer
tcatgtatatcccgaatttgaataca

SEQ ID NO: 165 - DNA, 53 bp, Artificial Sequence
  Synthetic oligonucleotide primer
ggggacaactttgtatacaaaagttgtaatgacaggaggctttaggaaatgca

SEQ ID NO: 166 - DNA, 55 bp, Artificial Sequence
  Synthetic oligonucleotide primer
ggggacaactttgtatagaaaagttgggtttactgcggtagaaggtgagaggcca

SEQ ID NO: 167 - DNA, 53 bp, Artificial Sequence
  Synthetic oligonucleotide primer
ggggacaactttgtatacaaaagttgtaatgtcgactgtgaagctagataggc

SEQ ID NO: 168 - DNA, 55 bp, Artificial Sequence
  Synthetic oligonucleotide primer
ggggacaactttgtatagaaaagttgggttaccagtgttctgcagaccagcagca

SEQ ID NO: 169 - DNA, 53 bp, Artificial Sequence
  Synthetic oligonucleotide primer
ggggacaactttgtatacaaaagttgtaatgtgtgagagcttcaagagagaat

SEQ ID NO: 170 - DNA, 55 bp, Artificial Sequence
  Synthetic oligonucleotide primer
ggggacaactttgtatagaaaagttgggttcatgttggccaatcctccactggtt

SEQ ID NO: 171 - DNA, 53 bp, Artificial Sequence
  Synthetic oligonucleotide primer
ggggacaactttgtatacaaaagttgtaatggccgttgaacctcttcgcgttc

SEQ ID NO: 172 - DNA, 55 bp, Artificial Sequence
  Synthetic oligonucleotide primer
ggggacaactttgtatagaaaagttgggttagtcaggcatgagtaggccaatgtc

SEQ ID NO: 173 - DNA, 53 bp, Artificial Sequence
  Synthetic oligonucleotide primer
ggggacaactttgtatacaaaagttgtaatgggtggtagcaatgcattgaatg

SEQ ID NO: 174 - DNA, 55 bp, Artificial Sequence
  Synthetic oligonucleotide primer
ggggacaactttgtatagaaaagttgggttacggaaactccggtaagtagggttg

SEQ ID NO: 175 - DNA, 53 bp, Artificial Sequence
  Synthetic oligonucleotide primer
ggggacaactttgtatacaaaagttgtaatggcgtcagctttcaaggggatct

SEQ ID NO: 176 - DNA, 55 bp, Artificial Sequence
  Synthetic oligonucleotide primer
ggggacaactttgtatagaaaagttgggttaacgacttgagctgctgccagcctt

SEQ ID NO: 177 - DNA, 53 bp, Artificial Sequence
  Synthetic oligonucleotide primer
ggggacaactttgtatacaaaagttgtaatgttagcttgtgctagcctcggcc

SEQ ID NO: 178 - DNA, 55 bp, Artificial Sequence
  Synthetic oligonucleotide primer
ggggacaactttgtatagaaaagttgggttatagcgcttagatattctgggcatc

SEQ ID NO: 179 - DNA, 53 bp, Artificial Sequence
  Synthetic oligonucleotide primer
ggggacaactttgtatacaaaagttgtaatggcggggaaattcggatcactga

SEQ ID NO: 180 - DNA, 55 bp, Artificial Sequence
  Synthetic oligonucleotide primer
ggggacaactttgtatagaaaagttgggttatttctgaactgaagggacaccatc

SEQ ID NO: 181 - DNA, 53 bp, Artificial Sequence
  Synthetic oligonucleotide primer
ggggacaactttgtatacaaaagttgtaatgaatcataatcacgatcccaaaa

SEQ ID NO: 182 - DNA, 55 bp, Artificial Sequence
  Synthetic oligonucleotide primer
ggggacaactttgtatagaaaagttgggtttgtatatcccgaatttgaatacaaa

SEQ ID NO: 183 - DNA, 56 bp, Artificial Sequence
  Synthetic oligonucleotide primer
ggggacaagtttgtacaaaaaagcaggcttagatttctatcaatgaaagtagacgt

SEQ ID NO: 184 - DNA, 52 bp, Artificial Sequence
  Synthetic oligonucleotide primer
ggggacaacttttgtatacaaagttgtagtgaaagacggatcgaataaattt

SEQ ID NO: 185 - DNA, 56 bp, Artificial Sequence
  Synthetic oligonucleotide primer
ggggacaagtttgtacaaaaaagcaggcttattcattaaaaaaatatttttatact

SEQ ID NO: 186 - DNA, 52 bp, Artificial Sequence
  Synthetic oligonucleotide primer
ggggacaacttttgtatacaaagttgttgttagttcttgtggggaatatttc

SEQ ID NO: 187 - DNA, 56 bp, Artificial Sequence
  Synthetic oligonucleotide primer
ggggacaagtttgtacaaaaaagcaggcttactgaaatttagtagagaaaaatata

SEQ ID NO: 188 - DNA, 52 bp, Artificial Sequence
  Synthetic oligonucleotide primer
ggggacaacttttgtatacaaagttgtattttccccttctctgttttggaag

SEQ ID NO: 189 - DNA, 56 bp, Artificial Sequence
  Synthetic oligonucleotide primer
ggggacaagtttgtacaaaaaagcaggcttactctttctaatttcaggttataatt

SEQ ID NO: 190 - DNA, 52 bp, Artificial Sequence
  Synthetic oligonucleotide primer
ggggacaacttttgtatacaaagttgtcgccgatcttcagtaaattaacaat

SEQ ID NO: 191 - DNA, 56 bp, Artificial Sequence
  Synthetic oligonucleotide primer
ggggacaagtttgtacaaaaaagcaggcttattttaaatatctgtattttgcctcc

SEQ ID NO: 192 - DNA, 52 bp, Artificial Sequence
  Synthetic oligonucleotide primer
ggggacaacttttgtatacaaagttgtagaaatattggatgaagaaaaattg

SEQ ID NO: 193 - DNA, 56 bp, Artificial Sequence
  Synthetic oligonucleotide primer
ggggacaagtttgtacaaaaaagcaggcttagaacagataagtgaagtttctctgc

SEQ ID NO: 194 - DNA, 52 bp, Artificial Sequence
  Synthetic oligonucleotide primer
ggggacaacttttgtatacaaagttgtcgagtttgattttcttgtttaaaac

SEQ ID NO: 195 - DNA, 56 bp, Artificial Sequence
  Synthetic oligonucleotide primer
ggggacaagtttgtacaaaaaagcaggcttattaataaattagtaatgaacaccta

SEQ ID NO: 196 - DNA, 52 bp, Artificial Sequence
  Synthetic oligonucleotide primer
ggggacaacttttgtatacaaagttgtgattctttaggtactcttcttcaat

SEQ ID NO: 197 - DNA, 56 bp, Artificial Sequence
  Synthetic oligonucleotide primer
ggggacaagtttgtacaaaaaagcaggcttaaccgcttaatatcgtatgattagta

SEQ ID NO: 198 - DNA, 52 bp, Artificial Sequence
  Synthetic oligonucleotide primer
ggggacaacttttgtatacaaagttgtttcgttcttcgttgcgtttttggtc

SEQ ID NO: 199 - DNA, 56 bp, Artificial Sequence
  Synthetic oligonucleotide primer
ggggacaagtttgtacaaaaaagcaggcttaagcttatagcgtagagatgattcac

SEQ ID NO: 200 - DNA, 52 bp, Artificial Sequence
  Synthetic oligonucleotide primer
ggggacaacttttgtatacaaagttgtggtggactcttgttttgggacttga

SEQ ID NO: 201 - DNA, 56 bp, Artificial Sequence
  Synthetic oligonucleotide primer
ggggacaagtttgtacaaaaaagcaggcttaagtaaagagaatgattattgagaat

SEQ ID NO: 202 - DNA, 52 bp, Artificial Sequence
  Synthetic oligonucleotide primer
ggggacaacttttgtatacaaagttgttgctttttgagctttggagactttt

SEQ ID NO: 203 - DNA, 56 bp, Artificial Sequence
  Synthetic oligonucleotide primer
ggggacaagtttgtacaaaaaagcaggcttaaaagaagagagaggaaggagaagag

SEQ ID NO: 204 - DNA, 52 bp, Artificial Sequence
  Synthetic oligonucleotide primer
ggggacaacttttgtatacaaagttgtgtctatctctgtgtgaacaaaatgt

SEQ ID NO: 205 - DNA, 56 bp, Artificial Sequence
  Synthetic oligonucleotide primer
ggggacaagtttgtacaaaaaagcaggcttaaagtcatacaacatcagtttttgtt

SEQ ID NO: 206 - DNA, 52 bp, Artificial Sequence
  Synthetic oligonucleotide primer
ggggacaacttttgtatacaaagttgttgatgcagaggcacttttagcttta

SEQ ID NO: 207 - DNA, 56 bp, Artificial Sequence
  Synthetic oligonucleotide primer
ggggacaagtttgtacaaaaaagcaggcttaaagtgtagattattacaagtatata

SEQ ID NO: 208 - DNA, 52 bp, Artificial Sequence
  Synthetic oligonucleotide primer
ggggacaacttttgtatacaaagttgtggggaagaatcttgagtggtttaaa

SEQ ID NO: 209 - DNA, 56 bp, Artificial Sequence
  Synthetic oligonucleotide primer
ggggacaagtttgtacaaaaaagcaggcttaatttcaatcatttatagctgaaggt

SEQ ID NO: 210 - DNA, 52 bp, Artificial Sequence
  Synthetic oligonucleotide primer
ggggacaacttttgtatacaaagttgtgttttttttttgaagaaagtgaaaa

SEQ ID NO: 211 - DNA, 27309 bp, Artificial Sequence
  Synthetically produced CAM carboxylation module
gtttacccgccaatatatcctgtcaaacactgatagtttaaactgaaggcgggaaacgacaatctgatccaagctcaagctgctctagcattcgccattcaggctgcgcaactgttgggaagggcgatcggtgcgggcctcttcgctattacgccagctggcgaaagggggatgtgctgcaaggcgattaagttgggtaacgccagggttttcccagtcacgacgttgtaaaacgacggccagtgccaagctttagggataacagggtaatggtttaccgagctcttattggttttcaaacttcattgactgtgcccctgcaggcacgtaataagtgtgcgttgaatttattcgcaaaaacattgcatattttcggcaaagtaaaattttgttgcataccttatcaaaaaataagtgctgcatactttttagagaaaccaaataattttttattgcatacccgtttttaataaaatacattgcataccctcttttaataaaaaatattgcatactttgacgaaacaaattttcgttgcatacccaataaaagattattatattgcatacccgtttttaataaaatacattgcataccctcttttaataaaaaatattgcatacgttgacgaaacaaattttcgttgcatacccaataaaagattattatattgcataccttttcttgccataccatttagccgatcaattgtgctcggcatctagagttatcaacaagtttgtacaaaaaagcaggcttagatttctatcaatgaaagtagacgttaaaaaaaaaaaaagatatcacagtacgtggaaacacgtgacacatattttaaagggaaaatataaacgtgaaatgcgtggaaactggcaagtagactattaatatttatgggcctatagtggttatatcaggctttattgggctctctatacgaattaaaagcctcaaacaaataatagaacttgaattgtaggcttttgtacccaccaaactggccgccggtgaccccctctcacgccgtatctctttttctttttcttgtttttttttttttttttttttttttttttttttgtgtgcgcgtatttgtttcaccatcaaaaaattaattttgttttaagtgttttattttccttcgttttgtttaaagtgtttaaaatcgttagttcaatgttgaaaaatatacaataatagaaacaattgtgacttttgtaatttgaatgaacaaaacatataacaataagtcctataatataaacattttaatttacattttcaactttttctcattttaaatttttattcagttgaaggcttgaagcgttggactactttagagaaactttacaagaacgttcttaacatctttttttctttcctttttgaatatcaaaatcagttaaaaacacttttgatctcacagaaactgatacaaagccgacggaaccgaccagattaggtcaaaaacgtaaaagacgcgcaaaaagaaaagaaaataactcataatagaatgttttagtcagaagaaaaaagtacaatatgaccaacgtaaacaaaaaagatgttgacgacataaagaaaagagctacagagacaaaggcattaaaatatcttttgtcgaaatctgaagatatttccttaagcgcgtttgcttctctgtctcctccattccattctatatcatctctgtctttgctctaagctttcctgtcaaaacaaaaattcaattccccacgtctgtcttatccacaataaaaccgaccttagcttagcttagactcattactcatttcacaaaaacagagagagaaatagagagacatactttacaggtaataattatcttgtttaattgtattatatatctctaactaaatttgggataaaaattgtctattcttgatcattcctctctgtatctctctgcttttgacaccttctcttagctgttttttcatcttttatctctgtttttaaaatcttttggctctttcgaagggtttcgagtccttttgagttctttgggcttcctcccaaatttctccacgagctcgacccctttcgtatcttccttctcatttttttgccaaatttattcgatccgtctttcactacaactttgtatacaaaagttgtaatgacaggaggctttaggaaatgcatggtgctttgttgtgcaagaaaactcccgaaagaaacaacaatgggaaccaccgcatacgacgaagccattacagggctgagcaagcttctcagtgagaagaaaggattggatgatgtagcagccgcaaaaatcaagcagttaacagcagagttgcagcagggcaccaagcaaaatggtgtttccgaaaacgggtttgacccggatgagcgcatcaaatccggattcatccggttcaagactgagaaatatgagaagaatcctgctctgtacggtgaacttgccaagggccagagtcccaagttcttggtatttgcctgctcagactcccgtgtttgcccctcccacatcttggatttcaagccaggggatgccttctcggttcgtaacatcgccaacatggtcccaccttttgataagacaaagttctctgggacaggggcagccattgagtatgctgtattgcatctaaatgtggagaatattgtggtcattggacacagctgctgtggaggaataaaggggctcatgtccatccctgattgtggcaccacttccacagacttcattgaagagtgggtcaagatcgctcagcctgctaggaccaaggtcaaagcagaagttagtagcgcagagttcacggagcagtgcaagaactgcgagaaggaagctgtcaatgtctctctcggaaacttgttgacatacccatttgtgagggaagcagtaatgaagaaaactctggcattgaagggtgcacattatgattttgtcaatggacgtttcgagctgtggaacctcgaatttggcctctcaccttctaccgcagtaaacccaacttttctatacaaagttgtaatggaacagaagctgatttctgaggaagatttgaatggcgaacagaaattgatatccgaggaggacctcaacggtttagatggagagcaaaaactaatcagcgaagaggaccttaacggggagcaaaagcttattagtgaagaagatctcaatggatcagcttgaacaactttgtataataaagttgtattcttctgtgcaatagcaacaatggaagattgggttcggtttcagttgttgccataccgtataaatgtgttcttaaagagagtctttttgtcgaggcttttcttcagttgggatgtatatgttttattaaggtgatgagtagtgatttggtgtgtcttttcaaatgctttgtggagtctgtttttccttataaaaatttattctaaatctggtttgtattttgggggtcttctttgctctttcttcattaacagaatactaattataagcttttcatatacaaaccttgaaaggaattttcatcagttactaattcgatttcagagaaatgaatcattcaaaacacttgattagagaaatgcttcttgaaccgggtcggtttaacgaaatccactggctggaaaaattatgcttttatatatataagaagcacccagctttcttgtacaaagtggttgataacagcgcttagagctctgccgagcacaattgatcggctaaatggtatggcaagaaaaggtatgcaatataataatcttttattgggtatgcaacgaaaatttgtttcgtcaacgtatgcaatattttttattaaaagagggtatgcaatgtattttattaaaaacgggtatgcaatataataatcttttattgggtatgcaacgaaaatttgtttcgtcaaagtatgcaatattttttattaaaagagggtatgcaatgtattttattaaaaacgggtatgcaataaaaaattatttggtttctctaaaaagtatgcagcacttattttttgataaggtatgcaacaaaattttactttgccgaaaatatgcaatgtttttgcgaataaattcaacgcacacttattacgtgggcgcgccttaattaaattaatggtaccggtgcgtttttatgcttgtagtattgtataatgtttttaagatcccctgcaggcacgtaataagtgtgcgttgaatttattcgcaaaaacattgcatattttcggcaaagtaaaattttgttgcataccttatcaaaaaataagtgctgcatactttttagagaaaccaaataattttttattgcatacccgtttttaataaaatacattgcataccctcttttaataaaaaatattgcatactttgacgaaacaaattttcgttgcatacccaataaaagattattatattgcatacccgtttttaataaaatacattgcataccctcttttaataaaaaatattgcatacgttgacgaaacaaattttcgttgcatacccaataaaagattattatattgcataccttttcttgccataccatttagccgatcaattgtgctcggcatctagagttatcaacaagtttgtacaaaaaagcaggcttaaccgcttaatatcgtatgattagtattaaaaatcttctccagaatttcaacgttgtttttgctactcacgcattgtaccttaaatgatcttattcatcatttctaacaaaacaatttatgcattcttcgccagtagaagaacctagtagagtgctatcggcaacaactccgtcttgttcatgcggatgcaaaagaagacgtccatgcccacgtccacgtccatgtccacctccacgtccacactattcaagaaattatacagacccttgaaaaagaagaatgaagaagagaaaacaaggatcaattatgggattggtacaatatagttgagggtattgtctaatgtagtacttttgaatatgcttatagatttagacatattaaagactattttctccttttaaatcaatgaagaaaatacttgagttcaatccttcttttgcctttgcataaccgtctctcatccacaccaacaaaacaaatcccagaaccttcttttgcagaattttaaagacacacaaagcaatgaataagaacacttggtttacaataacgatcgaaactggtttacaataatgaccgaatatggtttgcaaatatagatgaattggaatttaattgattcgatctatatctaaaattaaatttcttgggttccctaaatactatcctcttagggtttagatttctattatcaaaactctcgtttaatttgagcaaattggttaatcggagaggttagggaaaacaacgttttctggtataaagagacgagagaaacggtattgatggagttaaaagtgatgatgttgatgaaatactgagtcaacgttaataaggcaagagccgactgtgagaagcaaggtttcatggttgggaattttgttgcgcaacggagaagatgaagtgaattttgttgcgcaacggatttccgcaagcttttcccgagaaaacaaagatatcatctacattctatttttgtgctgtaacttttctgaattttttgtaaacaattttttgtgatatatatatatatataaacaattttatatcattaagtatggtactctttaatgtttttaacggaacatgaccaaaactgctagtgaaagcattttgtcttaactttacaaaagaagttatcttttttttaacacaaactggttttcttcggtaaataaaaagactaagtttgtaaatttattcttagacaattatttactattattgccgactaatatgaaaatgcaaagaagtcgtatttggcattatccaaaagaagggacaaaacacttatctcttaaaacttaaattttaagccattcgtttaccaacaatgaatcttgtggctgatgtagaaaccgcgttcacttgtcaacatttagaaataatgttggctttcaaagaattaaatagaaacaaccaaaatgtatgaggttgagcgtcttctatatatttattacaagacttgcgatgaccaaaaacgcaacgaagaacgaaacaactttgtatacaaaagttgtaatgtgtgagagcttcaagagagaataccagctctgcgaggagatcggtcgaggccgcttcggcgtcgtctaccgctgctacaacccctcctccaccgaagattccgacactcctttggctgtcaagtccattgataagcgcctcttcctcgacgacgagaccgaccgtgagtgccttgacaaggaacccaaaatcctccaccttctctctcctcaccctaatattctgcagatccataacctctttgattctgatacccatctcctcattgttaccgatctctgccaagaggagaccctttacgaacgcattatctctaacggccccttctctgagcctgacgctgcggctattttctgtcagctcgccgaggccctcgctcactgccaccgcaactacgtcgctcaccgtgatatcaaaccagacaacatactattcgactcaaggaacaggctgaagctctgcgacttcggctcggccgagtggttcggagcaggagacagagagatgcgcggtgtggtaggaacaccctactacgtggcgccggaggtgctttccggaaaagactacaatgagaaggcggatgtgtggagtgctggtgttattctctacatcatgctcggtggagttccacccttctatggtgagactgttgaggagacttttgaggctgttcttaggggaaatcttcgctttccggccaggattttccgaaacgtttctactcaggcaagggatttgttgaggaagatgatgtgcaaggatgtttccagaaggttttctgctgaacaagtcttaaggcatccttgggtaaccagtggaggattggccaacatgaacccaacttttctatacaaagttgtaatggaaggaaagcctattcctaatcctcttcttggacttgattctacttgaacaactttgtataataaagttgtatactttgagtttgagttactctgtgttcgaattttaaagtatatgtggttttctgttttagtttcgtgtctcaactctcaagtgtagaggaatgttataaactactatgcaatgaaggaactaatacttatgatggtattttactaattatgttattattcataattccatgcattagagccaattgtcgcattttttttctttcagaattcttcaaacttgtcaaatcgaaatctcttctttagaagcgactagattagtttttttcttcaaaagaaattctctactgaatttataatttaaagagttcacgagctgcctactaaaatatgaaaaatatttatgaatccagcaatacaaattgtagctttgcaatacaagaaagaacaacttttcatagagatcaaaaacgctagataaaaaaaaaacggggaagactaactagtaagtaccacgagtataacacattttttggatttagtttctatgattgctttcgccacccagctttcttgtacaaagtggttgataacagcgcttagagctctgccgagcacaattgatcggctaaatggtatggcaagaaaaggtatgcaatataataatcttttattgggtatgcaacgaaaatttgtttcgtcaacgtatgcaatattttttattaaaagagggtatgcaatgtattttattaaaaacgggtatgcaatataataatcttttattgggtatgcaacgaaaatttgtttcgtcaaagtatgcaatattttttattaaaagagggtatgcaatgtattttattaaaaacgggtatgcaataaaaaattatttggtttctctaaaaagtatgcagcacttattttttgataaggtatgcaacaaaattttactttgccgaaaatatgcaatgtttttgcgaataaattcaacgcacacttattacgtgggcgcgccttaattaaattaatggtaccggtctaatacccaatctctcgtcttatccagatgttttatacgcccctgcaggcacgtaataagtgtgcgttgaatttattcgcaaaaacattgcatattttcggcaaagtaaaattttgttgcataccttatcaaaaaataagtgctgcatactttttagagaaaccaaataattttttattgcatacccgtttttaataaaatacattgcataccctcttttaataaaaaatattgcatactttgacgaaacaaattttcgttgcatacccaataaaagattattatattgcatacccgtttttaataaaatacattgcataccctcttttaataaaaaatattgcatacgttgacgaaacaaattttcgttgcatacccaataaaagattattatattgcataccttttcttgccataccatttagccgatcaattgtgctcggcatctagagttatcaacaagtttgtacaaaaaagcaggcttactgaaatttagtagagaaaaatatatgtttttttctacatacagaatagtttgaatttttaaaatcggatttgaattttaaaaatagaaatagtgtttgtaagtaaaaaatatattgtactatttaagatgtatagaaataaaatattgttctatactattttcataactgatttgtaaatcaattttaattttagtatagagcaaaatgttttaaatataaagtaatagtgttggtagtggtgatgagatagtagtttatgttacgttaatatagcattataatcaattaaatgtttttgttggaaggatactaaaccctaagtggataatatattgggaacccaaagatttcaatctaaaatttaatattctttaaccatagaaaaatagaataatatatgtttgtcatcactaccaacataacgagtagcacagcacaagatagtctcttggtagaggaaagaagtggtagtagagaacaccgggtacaccatttgggttccacaatcgagggcacaaggagacacgaactcgccacacttaactagaaattgatgtaactccaaaaaaatccaaaattttacctttgtaaatcaaaacccccaattcaatttaatcacaaaccctagacgtcaattccaaaaattaaatgtattgattccgtcgccaatacatctccattgaacgttttcagaatccgaagctttacaaaaaggagatagtaatttttgggacccaaaaagctgttggaatgttaacagctgatgagaaagtgttttttggaaagagagaagaagaagaagaaaaagagcctgtatctcaggcaaagggtagcattgtcattattacagaaaatacaaataatatcagtatctttttgtgggatggttagttacttaattataatttttttgtagattaaaaactcaaatttctcaaaattatactctcctaagtagaaaaattttacaagtttgatttcttgaaaattgatattataatttatttttctgattagggtgggaagattctttataatttttttggtttacctgaaaatgaaagaaaagattgtaagaaagatacaacaagtgtagactggatcttttaaagtccaaaccaaaagccaaaaattaggtaacctaaatatgtaagactttattttttggtttttcttattaaaacaacatttcgataattcattatgatattttttacgctatgatcctcagccttaaactttcattcgtatagaaggataatatcataatagtacaactcttttaattgccaccaatcaactttattgtctgctttcaaaaattttattttttataaaatattattcattttagctataactcaatttggaacttttattcgtcccaaataaaatatctttccaagagagatggaaaaatagcttcatatagagatattttcaacaacttgtccctctctaaactcatccaccttccaaaacagagaaggggaaaatacaactttgtatacaaaagttgtaatgtcgactgtgaagctagataggcttacgtcgattgatgcccaattgaggctgcttgcacctaagaaggtctctgaggatgataaacttattgagtatgatgctttgctgctcgatcgcttccttgatattcttcaaaacttacatggggaagacatcaaagaaacggttcaagaattgtatgaacaatctgctgaatatgaaaggacacatgaccccaagaaattggaggagctgggaagcatggtgaccagtttggatgctggagattccattgtggttgccaaatcattttctcacatgcttaacctggctaaccttgctgaagaagtccagatttcccgtcgcaagagggtcaaaaaagtgaagaaaggagattttatggatgagaatactgcgatgactgagtcagatatggaagaaacactgcggaggcttattgtggatttgaagaaatccccacaagaaatttttgaaactttgaaaaaccagacagttgacttagttttcacagctcatcctacacaatctgttcgtagatccttgcttcaaaaacatggaaggataagggattgtttggcccaattgtatgccaaagacattactcccgatgataagcaggagcttgatgaggctctgcaaagagagatacaagctgcatttcgtactgatgaaatcaggaggactcagccaactccacaggatgagatgagagctgggatgagctacttccatgagacaatttggaatggtgttccaaaatttttgcgacgtcttgacacggcattgaagaacataggaataactgagcgtgttccctataatgcccctcttattcagttctcatcttggatgggtggtgatcgagatggaaatccgagagtaacacctgaagttactagggatgtatgtttattggctagaatgatggctgctaatatgtatttctcccagatagacgagctcatgtttgagctctcaatgtggagatgcaccgatgaacttcgtgaacgagcagaggaacttcacaaatattcaaagagagactccaaacactacattgagttttggaaacaaattccttccagtgagccttatcgtgttattcttgctgacgtgagggataagctctactatacacgtgaacgttctcgtcagttgttggcaagtgaggtctctgaaatccccgtcgaagcaaccttcaccgaaattgatcagtttctggagcctcttgagctttgctacagatctctctgtgcttgtggtgataggccagttgcggatggaagtcttcttgatttcatgcgacaagtagctacctttgggctttgtcttgtaaagcttgatattaggcaagaatcagagaggcatactgatgtgatggatgccattactacgcacctgggcattgggtcctaccgagactggacagaagagaagaggcaggattggctcttatctgagcttaggggcaagcgccctttgtttggccctgatcttcccagaactgatgaaattgctgatgttttggacacaataaatgtaatcgcagaactcccatctgatagtttcggcgcttatgttatctcgatggctactgccccttctgatgtgcttgctgttgagcttctgcaacgtgaatgtaaagttaaaaagcctttgagggttgttccattgtttgagaaacttgctgacctggaggctgctcctgcttctatgacccgcctattctccgtagattggtataaaaataggattgatgggaagcaagaagtcatgatcggatactctgattctggtaaggatgctggtcgtctctcagccgcttggcaaatgtacaaggttcaggaagagctgcttaaggtttctaagaaatttggggtgaagctcacaatgtttcatggacgaggaggaacggtgggaagaggagggggtcctactcatcttgctattttggcacagccagctgaaactattggtggatcacttcgtgttacaattcaaggtgaagtgattgaacaatcctttggagagcagcacttgtgttttagaacactccagcgttatacagctgctacacttgaacatgggatgaatccaccaaaatctcctaagccagaatggcgtgctctcttggaccagatggctgttgttgccacagaggaataccgctccatagtttttaaggagcctcgatttgtcgagtacttccgtctcgcaacgccagaaacggagtatgggcgcatgaacattgggagcaggccatcaaagagaaagccaagtggtggaattgaatctctccgtgcaatcccttggatctttgcatggactcaaactaggttccatctgcctgtgtggctgggcgttggcggagcacttaaacatgtccttgagaaagatataaggaaccataacatgcttagggacatgtacaacaatttccctttcttcagggtgaccattgatttgcttgaaatggtgttcgctaagggagaccctgaaattgccgctttatatgacaaactactggtgtcagaggagctgcagtcctttggggagcgtttgagggcaaattatgaagacactaaacgccgtctcctcgaggtcgctgggcataaagacctgctagagggagatccttacttgaaacagaggctccgccttcgtgatccctacatcacaaccctcaatgtctgccaagcgtataccctgaagcggattcgtgatcccgacttcaaggtaacagagaggccacacttatccaaggaaatcatggacgcacacaaggcagctgctgagctggtgaagctaaaccccactagtgagtatgctcctggacttgaagacacacttatcttaaccatgaagggtgttgctgctggtctgcagaacactggtaacccaacttttctatacaaagttgtaatgtctcatcatcatcatcatcatgcttagacaactttgtataataaagttgtagattcatagatcatatatatgtacatcatatccctctttagagcaggtactcgtgttcacctgcaaatgtaacaaagaacattatactatacaacaaatatacacattgaattatacctgtataaccaacataggtcaagattacatcatacgtgggctaggcccattttatattggcccaataagtgagtgactaaatcctttcgttcccaaatatatctccaccgatcaagagattcatcttccacccagctttcttgtacaaagtggttgataacagcgcttagagctctgccgagcacaattgatcggctaaatggtatggcaagaaaaggtatgcaatataataatcttttattgggtatgcaacgaaaatttgtttcgtcaacgtatgcaatattttttattaaaagagggtatgcaatgtattttattaaaaacgggtatgcaatataataatcttttattgggtatgcaacgaaaatttgtttcgtcaaagtatgcaatattttttattaaaagagggtatgcaatgtattttattaaaaacgggtatgcaataaaaaattatttggtttctctaaaaagtatgcagcacttattttttgataaggtatgcaacaaaattttactttgccgaaaatatgcaatgtttttgcgaataaattcaacgcacacttattacgtgggcgcgccttaattaaattaatggtaccggtgaattcccttatgtgagtgtaaaaggcaggcgagtttgtccccctgcaggcacgtaataagtgtgcgttgaatttattcgcaaaaacattgcatattttcggcaaagtaaaattttgttgcataccttatcaaaaaataagtgctgcatactttttagagaaaccaaataattttttattgcatacccgtttttaataaaatacattgcataccctcttttaataaaaaatattgcatactttgacgaaacaaattttcgttgcatacccaataaaagattattatattgcatacccgtttttaataaaatacattgcataccctcttttaataaaaaatattgcatacgttgacgaaacaaattttcgttgcatacccaataaaagattattatattgcataccttttcttgccataccatttagccgatcaattgtgctcggcatctagagttatcaacaagtttgtacaaaaaagcaggcttaaaagaagagagaggaaggagaagagaagaaaaagaagagagacacaacggagcgccaagaggctgatgaacacgtcaccgtacacgtgtcatgatcttgaagggtttgcaaagggaacgcatatgctgagctggcaaccctagatctgcgctggacattttaaatatctgacttaaataatgattggtacacgtagtcataatcgccaccgttcatcttgagatctctacgtagacttgacgtgctgctgattttattccttttaaataatgaaaatacagaattaaactataatgtataattcatttgagatccacagatgacgaaacgtggactaccaaatcaagcatatttgtttttaccatttaatcgacggctaatattgatttcatctacggtaaaatatatctttttttaaccagaaaaaggttagagtggtccccactgtaggatctactgacttgtgtcggccgttagtggttttataaagctgacgtgtcccactgaataaggaataccgttgtggtccctacggacaacgtgggattcgacgccagctcattttttaattttttcttgaaatcttttttaaaattttagacgatgactcaatcttcgccacgtaggatccacccaataaaaaagggttaacaaaatcttatctttaatgctaaattagttgagattaatccatgttgtttaaatccgaaatgatgcatataatcttgtttcttataatcattaagatttagactgaagatctaattccaatttaagagagtcactaaaaaaagaatgaattcaatttcagacaaatccgacaaggtcaaggtgacgtgttcttgatgccaattctagtgggagccacttgacgcgtgcagttagactcccggtccaagacataaatttacgttaataccctcctttattgggttattattgggccgtagttgaattattagacccaacctttttatcctgttcttgattggcacatactttgcaaaaagttaacaaaataacttttattgcaaggcattacaagagaaatgtcaaatttggttgttgcatacatgacatcttattcatatccaatccataaattgatgtgttgttattcaaactggtcttttgatgtattgttagacatatctcatatatattgaacccttggaatcaatataatagattgggctttatttatcttttattgggcttaaagggaattgttggactaaaaaaaccattaaggctataacacactaattacacgtacaatgagagtgagagtcacggacgggatgattacaagaatcatatagcaccaaatatctcatcctcactctcacatacaaacacacattttgttcacacagagatagacacaactttgtatacaaaagttgtaatggccgttgaacctcttcgcgttcttgtcaccggcgccgccgggcaaattgggtatgctctcgttcccatgattgctaggggaataatgctgggtgctaatcagcctgtgatcttgcacatgctcgatattcctccagcagccgaggcattgaacggagtgaaaatggagctggtggatgctgcctttccacttcttaaaggcgttgttgctacaaccgatgctgctgaagcctgcaaaggtgtaaatgttgctgtcatggttggtggcttcccaaggaaagaaggcatggagaggaaggatgtgatgtcaaagaatgtttccatctacaaggctcaagcttctgctcttgagcaacatgctgctcccaattgcaaggttttggttgttgccaaccctgccaacaccaatgctttgatcctaaaggaatttgccccatcaatcccggagaagaacatttcttgtttgacaaggcttgaccacaacagagctctaggtcagatctcagagagattgaatgttcaagtctctgatgttaagaatgtgattatttggggaaaccactcctcaactcaataccctgatgtcaaccacgctaccgtgaaaacacagggtgttgataagcctgttcgtgagcttgttgctgatgatgcatggttgaatggagagttcataacaactgtgcaacagcgtggagctgccatcatcaaggcaaggaagctctccagtgcattgtcagctgctagttctgcttgtgatcacatccatgattgggtgcttggaaccccagagggaacatgggtatctatgggtgtgtattctgatggctcgtacaatgtgccagctggaatcatttactccttcccagtaacttgtaaaaatggagaatggacaatcgtccaagggctgccaattgacgatgactcaaggaagaaaatggatgcaactgctgcagagcttgtcgaggagaagacattggcctactcatgcctgactaacccaacttttctatacaaagttgtaatggctggatctactggagcttcttggtctcatcctcaatttgaaaagggaggaggttctggaggtggatctggtggaggatcatggtctcatccacagttcgaaaagggagctggatctaggcctatttgaacaactttgtataataaagttgtactttgtataagatcattagttgttaattttttaaatatgaatttctaaactatccaccaactaagcatgttgtgacaagcaaaagtatatagataattagatattatatgtatatgtttaaaattgcgtaatatgctttacaggtcgattgttctcctaatcatttgattcttcttaatttattggattacgaaatgacatttctttgtcacctttttcgtgcatatcagatttgtttaaagtttacgtgacgaatgacgattgatcttttatcttgttgtgccgccgtattttgtatggacattacttgtaatactatatatatcagctatgcgttaactatactcatcaaataccacatatgatttattatatcaaagtacttattaataaataattaaattaaccttatattcaattgcacttgggtgagaaagccgttagaaaaaactcccgctatagaagaaatgtggtagatttgaaccgaaattaaatattttcacccagctttcttgtacaaagtggttgataacagcgcttagagctctgccgagcacaattgatcggctaaatggtatggcaagaaaaggtatgcaatataataatcttttattgggtatgcaacgaaaatttgtttcgtcaacgtatgcaatattttttattaaaagagggtatgcaatgtattttattaaaaacgggtatgcaatataataatcttttattgggtatgcaacgaaaatttgtttcgtcaaagtatgcaatattttttattaaaagagggtatgcaatgtattttattaaaaacgggtatgcaataaaaaattatttggtttctctaaaaagtatgcagcacttattttttgataaggtatgcaacaaaattttactttgccgaaaatatgcaatgtttttgcgaataaattcaacgcacacttattacgtgggcgcgccttaattaaattaatggtaccggttgcttgcaaaagcagtaattggaaagcactctcaaagaatccttaattaaagcgtaatgctctgcttaccaatgcttaatcagtgaggcacctatctcagcgatctgtctatttcgttcatccatagttgcctgactccccgtcgtgtagataactacgatacgggagggcttaccatctggccccagcgctgcgatgataccgcgagaaccacgctcaccggctccggatttatcagcaataaaccagccagccggaagggccgagcgcagaagtggtcctgcaactttatccgcctccatccagtctattaattgttgccgggaagctagagtaagtagttcgccagttaatagtttgcgcaacgttgttgccatcgctacaggcatcgtggtgtcacgctcgtcgtttggtatggcttcattcagctccggttcccaacgatcaaggcgagttacatgatcccccatgttgtgcaaaaaagcggttagctccttcggtcctccgatcgttgtcagaagtaagttggccgcagtgttatcactcatggttatggcagcactgcataattctcttactgtcatgccatccgtaagatgcttttctgtgactggtgagtactcaaccaagtcattctgagaatagtgtatgcggcgaccgagttgctcttgcccggcgtcaatacgggataataccgcgccacatagcagaactttaaaagtgctcatcattggaaaacgttcttcggggcgaaaactctcaaggatcttaccgctgttgagatccagttcgatgtaacccactcgtgcacccaactgatcttcagcatcttttactttcaccagcgtttctgggtgagcaaaaacaggaaggcaaaatgccgcaaaaaagggaataagggcgacacggaaatgttgaatactcatattcttcctttttcaatattattgaagcatttatcagggttattgtctcatgagcggatacatatttgaatgtatttagaaaaataaacaaataggggtcagtgttacaaccaattaaccaattctgaacattatcgcgagttaattaaggtgcgtttttatgcttgtagtattgtataatgtttttaagatcctagggataacagggtaatgagctcggatccactagttcgggggatctggattttagtactggattttggttttaggaattagaaattttattgatagaagtattttacaaatacaaatacatactaagggtttcttatatgctcaacacatgagcgaaaccctataggaaccctaattcccttatctgggaactactcacacattattatggagaaactcgagtcaaatctcggtgacgggcaggaccggacggggcggtaccggcaggctgaagtccagctgccagaaacccacgtcatgccagttcccgtgcttgaagccggccgcccgcagcatgccgcggggggcatatccgagcgcctcgtgcatgcgcacgctcgggtcgttgggcagcccgatgacagcgaccacgctcttgaagccctgtgcctccagggacttcagcaggtgggtgtagagcgtggagcccagtcccgtccgctggtggcggggggagacgtacacggtcgactcggccgtccagtcgtaggcgttgcgtgccttccaggggcccgcgtaggcgatgccggcgacctcgccgtccacctcggcgacgagccagggatagcgctcccgcagacggacgaggtcgtccgtccactcctgcggttcctgcggctcggtacggaagttgaccgtgcttgtctcgatgtagtggttgacgatggtgcagaccgccggcatgtccgcctcggtggcacggcggatgtcggccgggcgtcgttctgggctcatggtagactcgagagagatagatttgtagagagagactggtgatttcagcgtgtcctctccaaatgaaatgaacttccttatatagaggaaggtcttgcgaaggatagtgggattgtgcgtcatcccttacgtcagtggagatatcacatcaatccacttgctttgaagacgtggttggaacgtcttctttttccacgatgctcctcgtgggtgggggtccatctttgggaccactgtcggcagaggcatcttgaacgatagcctttcctttatcgcaatgatggcatttgtaggtgccaccttccttttctactgtccttttgatgaagtgacagatagctgggcaatggaatccgaggaggtttcccgatattaccctttgttgaaaagtctcaatagccctttggtcttctgagactgtatctttgatattcttggagtagacgagagtgtcgtgctccaccatgttatcacatcaatccacttgctttgaagacgtggttggaacgtcttctttttccacgatgctcctcgtgggtgggggtccatctttgggaccactgtcggcagaggcatcttgaacgatagcctttcctttatcgcaatgatggcatttgtaggtgccaccttccttttctactgtccttttgatgaagtgacagatagctgggcaatggaatccgaggaggtttcccgatattaccctttgttgaaaagtctcaatagccctttggtcttctgagactgtatctttgatattcttggagtagacgagagtgtcgtgctccaccatgttggcaagctgctctagccaatacgcaaaccgcctctccccgcgcgttggccgattcattaatgcagctggcacgacaggtttcccgactggaaagcgggcagtgagcgcaacgcaattaatgtgagttagctcactcattaggcaccccagcggccgcggtatcactagtattacagaggtaagttataacagtcgcctaaccgaattcagaaataaattcagcctaattcggcgttaattcagtacattaaaaacgtccgcaatgtgttattaagttgtctaagcgtcaatttgtttacaccacaatatatcctgccaccagccagccaacagctccccgaccggcagctcggcacaaaatcaccactcgatacaggcagcccatcagtccgggacggcgtcagcgggagagccgttgtaaggcggcagactttgctcatgttaccgatgctattcggaagaacggcaactaagctgccgggtttgaaacacggatgatctcgcggagggtagcatgttgattgtaacgatgacagagcgttgctgcctgtgatcaattcgggcacgaacccagtggacataagcctgttcggttcgtaagctgtaatgcaagtagcgtatgcgctcacgcaactggtccagaaccttgaccgaacgcagcggtggtaacggcgcagtggcggttttcatggcttgttatgactgtttttttggggtacagtctatgcctcgggcatccaagcagcaagcgcgttacgccgtgggtcgatgtttgatgttatggagcagcaacgatgttacgcagcagggcagtcgccctaaaacaaagttaaacatcatgggggaagcggtgatcgccgaagtatcgactcaactatcagaggtagttggcgtcatcgagcgccatctcgaaccgacgttgctggccgtacatttgtacggctccgcagtggatggcggcctgaagccacacagtgatattgatttgctggttacggtgaccgtaaggcttgatgaaacaacgcggcgagctttgatcaacgaccttttggaaacttcggcttcccctggagagagcgagattctccgcgctgtagaagtcaccattgttgtgcacgacgacatcattccgtggcgttatccagctaagcgcgaactgcaatttggagaatggcagcgcaatgacattcttgcaggtatcttcgagccagccacgatcgacattgatctggctatcttgctgacaaaagcaagagaacatagcgttgccttggtaggtccagcggcggaggaactctttgatccggttcctgaacaggatctatttgaggcgctaaatgaaaccttaacgctatggaactcgccgcccgactgggctggcgatgagcgaaatgtagtgcttacgttgtcccgcatttggtacagcgcagtaaccggcaaaatcgcgccgaaggatgtcgctgccgactgggcaatggagcgcctgccggcccagtatcagcccgtcatacttgaagctagacaggcttatcttggacaagaagaagatcgcttggcctcgcgcgcagatcagttggaagaatttgtccactacgtgaaaggcgagatcaccaaggtagtcggcaaataatgtctagctagaaattcgttcaagccgacgccgcttcgcggcgcggcttaactcaagcgttagatgcactaagcacataattgctcacagccaaactatcaggtcaagtctgcttttattatttttaagcgtgcataataagccctacacaaattgggagatatatcatgcatgaccaaaatcccttaacgtgagttttcgttccactgagcgtcagaccccgtagaaaagatcaaaggatcttcttgagatcctttttttctgcgcgtaatctgctgcttgcaaacaaaaaaaccaccgctaccagcggtggtttgtttgccggatcaagagctaccaactctttttccgaaggtaactggcttcagcagagcgcagataccaaatactgtccttctagtgtagccgtagttaggccaccacttcaagaactctgtagcaccgcctacatacctcgctctgctaatcctgttaccagtggctgctgccagtggcgataagtcgtgtcttaccgggttggactcaagacgatagttaccggataaggcgcagcggtcgggctgaacggggggttcgtgcacacagcccagcttggagcgaacgacctacaccgaactgagatacctacagcgtgagctatgagaaagcgccacgcttcccgaagggagaaaggcggacaggtatccggtaagcggcagggtcggaacaggagagcgcacgagggagcttccagggggaaacgcctggtatctttatagtcctgtcgggtttcgccacctctgacttgagcgtcgatttttgtgatgctcgtcaggggggcggagcctatggaaaaacgccagcaacgcggcctttttacggttcctggccttttgctggccttttgctcacatgttctttcctgcgttatcccctgattctgtggataaccgtattaccgcctttgagtgagctgataccgctcgccgcagccgaacgaccgagcgcagcgagtcagtgagcgaggaagcggaagagcgcctgatgcggtattttctccttacgcatctgtgcggtatttcacaccgcatatggtgcactctcagtacaatctgctctgatgccgcatagttaagccagtatacactccgctatcgctacgtgactgggtcatggctgcgccccgacacccgccaacacccgctgacgcgccctgacgggcttgtctgctcccggcatccgcttacagacaagctgtgaccgtctccgggagctgcatgtgtcagaggttttcaccgtcatcaccgaaacgcgcgaggcagggtgccttgatgtgggcgccggcggtcgagtggcgacggcgcggcttgtccgcgccctggtagattgcctggccgtaggccagccatttttgagcggccagcggccgcgataggccgacgcgaagcggcggggcgtagggagcgcagcgaccgaagggtaggcgctttttgcagctcttcggctgtgcgctggccagacagttatgcacaggccaggcgggttttaagagttttaataagttttaaagagttttaggcggaaaaatcgccttttttctcttttatatcagtcacttacatgtgtgaccggttcccaatgtacggctttgggttcccaatgtacgggttccggttcccaatgtacggctttgggttcccaatgtacgtgctatccacaggaaagagaccttttcgacctttttcccctgctagggcaatttgccctagcatctgctccgtacattaggaaccggcggatgcttcgccctcgatcaggttgcggtagcgcatgactaggatcgggccagcctgccccgcctcctccttcaaatcgtactccggcaggtcatttgacccgatcagcttgcgcacggtgaaacagaacttcttgaactctccggcgctgccactgcgttcgtagatcgtcttgaacaaccatctggcttctgccttgcctgcggcgcggcgtgccaggcggtagagaaaacggccgatgccgggatcgatcaaaaagtaatcggggtgaaccgtcagcacgtccgggttcttgccttctgtgatctcgcggtacatccaatcagctagctcgatctcgatgtactccggccgcccggtttcgctctttacgatcttgtagcggctaatcaaggcttcaccctcggataccgtcaccaggcggccgttcttggccttcttcgtacgctgcatggcaacgtgcgtggtgtttaaccgaatgcaggtttctaccaggtcgtctttctgctttccgccatcggctcgccggcagaacttgagtacgtccgcaacgtgtggacggaacacgcggccgggcttgtctcccttcccttcccggtatcggttcatggattcggttagatgggaaaccgccatcagtaccaggtcgtaatcccacacactggccatgccggccggccctgcggaaacctctacgtgcccgtctggaagctcgtagcggatcacctcgccagctcgtcggtcacgcttcgacagacggaaaacggccacgtccatgatgctgcgactatcgcgggtgcccacgtcatagagcatcggaacgaaaaaatctggttgctcgtcgcccttgggcggcttcctaatcgacggcgcaccggctgccggcggttgccgggattctttgcggattcgatcagcggccgcttgccacgattcaccggggcgtgcttctgcctcgatgcgttgccgctgggcggcctgcgcggccttcaacttctccaccaggtcatcacccagcgccgcgccgatttgtaccgggccggatggtttgcgaccgctcacgccgattcctcgggcttgggggttccagtgccattgcagggccggcagacaacccagccgcttacgcctggccaaccgcccgttcctccacacatggggcattccacggcgtcggtgcctggttgttcttgattttccatgccgcctcctttagccgctaaaattcatctactcatttattcatttgctcatttactctggtagctgcgcgatgtattcagatagcagctcggtaatggtcttgccttggcgtaccgcgtacatcttcagcttggtgtgatcctccgccggcaactgaaagttgacccgcttcatggctggcgtgtctgccaggctggccaacgttgcagccttgctgctgcgtgcgctcggacggccggcacttagcgtgtttgtgcttttgctcattttctctttacctcattaactcaaatgagttttgatttaatttcagcggccagcgcctggacctcgcgggcagcgtcgccctcgggttctgattcaagaacggttgtgccggcggcggcagtgcctgggtagctcacgcgctgcgtgatacgggactcaagaatgggcagctcgtacccggccagcgcctcggcaacctcaccgccgatgcgcgtgcctttgatcgcccgcgacacgacaaaggccgcttgtagccttccatccgtgacctcaatgcgctgcttaaccagctccaccaggtcggcggtggcccatatgtcgtaagggcttggctgcaccggaatcagcacgaagtcggctgccttgatcgcggacacagccaagtccgccgcctggggcgctccgtcgatcactacgaagtcgcgccggccgatggccttcacgtcgcggtcaatcgtcgggcggtcgatgccgacaacggttagcggttgatcttcccgcacggccgcccaatcgcgggcactgccctggggatcggaatcgactaacagaacatcggccccggcgagttgcagggcgcgggctagatgggttgcgatggtcgtcttgcctgacccgcctttctggttaagtacagcgataaccttcatgcgttccccttgcgtatttgtttatttactcatcgcatcatatacgcagcgaccgcatgacgcaagctgttttactcaaatacacatcacctttttagacggcggcgctcggtttcttcagcggccaagctggccggccaggccgccagcttggcatcagacaaaccggccaggatttcatgcagccgcacggttgagacgtgcgcgggcggctcgaacacgtacccggccgcgatcatctccgcctcgatctcttcggtaatgaaaaacggttcgtcctggccgtcctggtgcggtttcatgcttgttcctcttggcgttcattctcggcggccgccagggcgtcggcctcggtcaatgcgtcctcacggaaggcaccgcgccgcctggcctcggtgggcgtcacttcctcgctgcgctcaagtgcgcggtacagggtcgagcgatgcacgccaagcagtgcagccgcctctttcacggtgcggccttcctggtcgatcagctcgcgggcgtgcgcgatctgtgccggggtgagggtagggcgggggccaaacttcacgcctcgggccttggcggcctcgcgcccgctccgggtgcggtcgatgattagggaacgctcgaactcggcaatgccggcgaacacggtcaacaccatgcggccggccggcgtggtggtgtcggcccacggctctgccaggctacgcaggcccgcgccggcctcctggatgcgctcggcaatgtccagtaggtcgcgggtgctgcgggccaggcggtctagcctggtcactgtcacaacgtcgccagggcgtaggtggtcaagcatcctggccagctccgggcggtcgcgcctggtgccggtgatcttctcggaaaacagcttggtgcagccggccgcgtgcagttcggcccgttggttggtcaagtcctggtcgtcggtgctgacgcgggcatagcccagcaggccagcggcggcgctcttgttcatggcgtaatgtctccggttctagtcgcaagtattctactttatgcgactaaaacacgcgacaagaaaacgccaggaaaagggcagggcggcagcctgtcgcgtaacttaggacttgtgcgacatgtcgttttcagaagacggctgcactgaacgtcagaagccgactgcactatagcagcggaggggttggatcaaagtactttgatcccgaggggaaccctgtggttggcatgcacatacaaatggacgaacggataaaccttttcacgcccttttaaatatccgattattctaataaacgctcttttctcttag
